United States Patent Application Publication US 2012/0107916 A1 - sequence listing, part 2

SEQ ID NO: 14 - DNA, 6000632 bp, Clostridium beijerinckii (residues 2,000,212-4,000,422 of 6,000,632)
taaaattgaagaggcaccatctaacatagctattttaggtagatatataataacgccagatatatttgatatacttgaaagtaccaaaccaggaaaatcaggagaaattcaattgacagatgcgttaaaagaattaacaagacaagaagcagtatatgcttattgctttgaaggaaaaaggtatgatgttggtgataagttaggataccttcaagctaatatagcatttactttaaaacgcgatgatttaaaggatgattttataacttacttgtcagatttaagagatagaagtgctaacctagatttgattcattaaaacgtaatacattgtttagatgatgcaaactttatataattttccccgtttgtataaaaatattttataaataaattaatatatcaatagttaggaaaaacaaatttatagtatgagtatagttaattaatgttgggtatattagtaacgtaagataaaaagtaatcaaaggaggagaaatatgagtagttcaactatgactattgcgactaaaaaaaagttagaacataaggatcagaatgctataataacgaattcaacatctgaaactattattgtatatggaccaagaagagaaacagatggaggaaactatgataattcgtggtatgttctccactcaggagaaactattcctagtgattggcaatgtgacggaatttttattcctaaggatagaaaatttatgcaaatgagcgatgaaactatacaaggtccagtagctgtaaagtttggaagcttgatgccagttacaataatacaggatggagaagtatatatagaaaaaggtagtcacaatgaaggtgtgttccataaatctgaaatagattgggatgtaccagactttgatgcggagtattgccaaaatataagcatggcagcatatcaaatccaacccaataagaggttttaaatctttcttaaaaataaaaatccatggattacttcttagtaatacgtggattttttaaataaaaaattagataatataaaattaaaattgaaagtcttgcaaataaacaaatatttgtggattatcactataaatatataagggcaaaggagtgaaaaaaatgtcaaaagctttatttgtaaatatgttaggtcacggacatgttaatccaactataggaatagttagggagctcataaataggggagaagatgttacatatatagcaggagaagagtttagagataaaatagaaaaaacaggtgctaagtttattgggcataaaaatttatttgatttatctagtttaattaccagtagtttaaatttagaaactaatgaaaaactattgaatgcccttaatacttttaaagaaataatcgaagagatcttcaaattagatgaaaaatttgattatattatttacgattcttcgtttgtattaggtggagaagtgggaagagtattaaatataccaacaatttcttctagtagcatttttgcaataaatgaaaaaataataaaaagtttgttagatctaccaatctcacaagaatttaagttaaagatggaaggagctaagccaaagattaaagaaattctaagcagtcataattatgtggactttgtcaatgaattacaagagaagtataatataaagtttcctagcatggtagatagatctggaaagaaagcaatgcttaatattgtatatacatctaagtactttcaaccatatagcgaaagttttgatgaaagttataaatttattgggtcatcagtaatagatagaaaagaaagtatcgactttgatttatcaaatgatgaggataagaaggtaatttatatatctctaggaactatattcaataattctattgaattctatgagtgttgctttaaagctttttgcaatatgaatgtaaaagttattatgtctgtaggcaggaaaattgatataagtatgtttaaaaatattccatccaactttatagttcgtaactatgtaccacaattagaagtattaaaatatgcagatgtatttatcactcatggtggtatgaatagtacaaatgaaggcttatactttaacataccattaattttaatacctcaatcagttgatcaaccttttgtagctaatagggtggctgagcttggcgcaggaattgtcatagaaaaaaatagaattacgccggaagcgctaaataaatgtgtagctgagatactatcagatgataattttaggcttaacagtgagaagataggtgaatctttaagggaagcaggaggatataaagttggagttgatgaaataataaagctaaaagattctatgaaatagtatttagctattgataagccaaatttaattagtttagatttattgtatataaacataaggtgttagaatatcgcaaattcatttgaattatgcgatatttattttaaaaatttataatttatatggaagaaattcgcattaaatgaaatataatattataatttatgatagtatatttattataatatttcaaaaagaaataaagctatatataattgactatcagctttatattaagtaaataggagatgcaatatggaattaagggatatatataatagtaaaggatataaaactggagtaagaaaagaacggtccgaaaagctagaagatggtgaatattatttagcaactgaagtgtggataattaatagcagcagcaaaatattaattcaacaaagatcaagtaacaaggatgtacttcctaatatgtgggggttaactacaggatgtatggttagtggagagggcacagcggaaggagctttgagagaagttaaggaagagataggattatctatcgaaaaagatgagttgaattttattcgtagaatatttcgcgaaaattctatttgggatatatattttgtatataaggatgttgaattatctaaattaatccttcaaaaggaagaagttagtaacgtgaaatttgtatctattgaagaatttaataatatgcttttatctggagaactatttgaatatccagaaatttatgatatgttatcactaattaatgataaagttagtgaatattagatgcagttagttatatcaaaaaagacaagaaaatttataatacatatcttaatatttgtttattttaagataacagaatggtctgtgacatgtttgtaacaaaaattagctataataaaaataattgatatttttgtggagggatataatgaaggggaaaaggatactagttgttgatgacgaaccattaataagaaagctcgtaacagattttctgaaaaaacaagggtatgtaacaattgaggctgatgatggaaagaaagctatgaatttgttttctaatgaggaaaatatagatttaataattcttgatgtaatgctgccagaatatgatggatttactgtatgcagagagataagaaagaaatctaaagttccgattattatgctaactgcaagaggagaggaatttgatgaagtttttggattagatattggagctgatgagtatatatcaaaaccttttagtcctaatatactaatagcgagagttaatgctgttctgagaagggcaaattcagaagataaaggtaaagaactcaaagattttaatggattgacaatagaccatagtgcccatcaagtagttatagatggagaagttgttgatttaagtcctaaggaatatgaactattgatttatctttctgaaaattatggaaaagcattaagtagagagcaaatattagataaggtatggggatatgattattatggagacttaaggacagtggatacacatataaatagattaagaataaagttagatagaaaaagtgattatatacaaacagtacgcggttacggttataggtttgaggaataggtatgaataagtcattaagatcaaaactttttttatcgataactttattgttagttttttttatctctgctttatggatattaaataacttatatcttcagcaatactacattaagaataaagaaaatatgcttgaaaataatgcaaagcatttagttgatatgtatactggagatccaaatgatattcaggatgaacttgatagaaccgctaatatagtaggtggcagcatagatattagagataaagatggtaagctaatatataaatcttcaagacggctgccaaatgaaaaaaatatagttgataacatgggaaataaatttagacctaatgtggagccaccaccagattctgatgttcaaaacgataagattaacaatacatatagtgagggaaagtatacatttgaaaatagaagggatgttcaacttaaaatagactttctaacgcttgtaaccaaaataagtaatggtgacatccttgctataagagttccattagtctcaataagtgaaagtgttgatattgcaaatagatttatattaattattggaggagtaattatacttttagggagcttatgggcattttggttttcaaaaagatttacaaaaccaatactagaattaaatagcatagcgcagaatatggctaaattcgattttgggaaaaaatgtagtatgaatggaaaagatgaaattggccaacttggacaaagcgttaattatttatctggagagctaagccgggcaattacggaattgaatataaaaaataagagattagaagaagatatagagaaggaaagaaaaatagatgaaatgagaaaagaatttatatcaagtgtttctcatgagttaagaactccgctatcagtaatacaaggctatgcagaaggtcttgttagcaatgttacagaaagtgatgaagataggaagttttactgtgatgttattatgaatgaaactgataaaatgaacaaattagtaagagatttattaaacttatcacaaattgaatctggttattttcatatagaaaaaacagaatttaatttagtatcattaatagaatatgtacttaatagatataaatcaactttcgaagaaaaaagtatagaaatcaaatttgaacccggagaaagcgtgattgtatacggagatatgacgcgtatagagcaaatacttacaaactacattaataatgcaattaatcatgtagacaataataagatcattaggataactaagattaatgtcaaagataaaataagaataaatgtatttaatacaggaaagcatataccagatgaatatttggataagatatggagtagcttttataaagtagataaagctaggacaagagcttatggaggatatggattgggcttatctatagtaaaggcaatagcagatcttcatcgtaatgcttatggagtggaaaacactgaaggtggagttaacttttggtttgaaattgataagatagatttaagtttagcagcaaattaaaaataaaaagggagttgtcgatatatcagattaaaatctgttagcggcagctccctaatttatatataagttttcaataagataatttattcattataaaattatttagtttatatagcctgatagattaagataggtttcgatgaactaaattttctagaaaatacatattataaattatttttaatttttattttgttcgaaataccaatgcttgtaccagttaaaacaccacataacatggagtaaacaattgtaggaatttcaatcacataaataccaatagcggcaataaataataaagaaatcattaaaaagaatatacaaaaaaattgcttccatttttgctgaactttaatttttgaatttattatatctgtaaatttgtacttttcatcgaattttaaatacatagcctgactcagtgttaataagaataccatgggcaataatttataaagtaaatctatcatattattttaccatcctccacgaaaataatttagttatttaggtatttaaagtctaacaatagatatttttatacctaattataatatgggtgaaataaatagacaaatagtgctttattacattagagtaattatattcttttatacgtgcattctactagaaaatagttattatcattaatatttagttatacgcttagagacaataagaataaagaaataggtaaaaatttagcttaaatgtttacaagataaggaaaaatgttttagaaaaacaaatttaatgaatcaaaagttatgatataattattgtaaaattattacaataattatatcatgcaaaactaaaggacaacttaatttctataaattatttaagattaagaagtgtttggttccatactcttagattattggaatgatttaaaatatgcatagctaaaaggaaaacaataatgaataaaaggaggaatacaatggggaaggtgttgggaaatagatataataataaattaacaagatttattccatgttgcattgcaataacagtagtattttttacaaattttatagaggctaaagctacaataggaaatagtatctatgaagtgagttcaaataacattaatatgattagggaacaacataaatttatcattgatgcgcctataaaattttataatgacataaaaagattagagcaggtgatagacttcaaatttaaagttccggatttttttccagaagggtataaagtgcaagaacttcaattaaaaaaagtttctgataaagataatgttttagaaatagtttatggaaataaagatggaatatgttcattacaaatatctgagcaagacccttcagaatcactaaaagcgatagaaaatgggaaatctaaggcattagaaaattctcaggtggaaatatccaagcaaccaatgaagataggcgatataaatggattaagtgttattttaacaactacatttccagcaaaaaaagctatagaagaccaatttagcgaaataaaagctgttagtaattatttttcatggaaagatgatggattatggtatagcatagaatataaatcggagtctaaaagcgaaaagagtagcaataacttattagaactttcaagtgatgatataaaaaatatagtgaaatcgttaaaatatcctgaggacacaaaagattcaaattattgcataaagaatcttaatgatggaaatatagaaatgaacatttatgatagagaagatatagaagaagcaaaaaatgctctcggatttgatcctaaatttccaattagaattagtaatgatataagtataactaactccactgctagactagttggagatttgaataataacaaagaaaaaacatgctatgaaataaataatctttattcaaacaaaaatggttcgataacatttagtcagtctgtgaattcatcagtttatgatgaaataatgagaaataagtatattaaaattaatgaagaaagaaacgtagagaagaaagttgaagaattaagaattgaaaataataaagtatttaaacgttcacaagaaggcatcgtgcctcaggttaattatgtctggaaagaaaataacatatattatagtgtgatattttttgtaaatattgaaaattgtgatggaattgttaaagaatttatgaattcaaagccactagaatagagttatttaaatagaatattgataaatatattatgttaagaagacttttataaaaatagtagggaatataacagacagaccctactatttttttattcacagattaattagcgtcaattatagagggagtaccccaaatttcatttataaagttagtgctaattttaaagtagattgtaggatattctccatagtatatataaccattccttaatatcgtaaaaggaatatttttactaccatcttttaaatccaaaaatatctttttacatttatcattatttttataatcatctaaagaattctctatattttctggtagatatggagttgaattgtctagttctcgaacaaaagaattaagaaaactaggatcactagctgtataaaagttctctttttcactcttcgaattactaaatgtttgaatttgaactctggcatttacgatatttcccgggagattaagttttccgaaaaagtcattgccagtagttattgtaattccattaaggcactcataaatttcgggggaatttgtcccatcacttaaagttacattagtcattattctaaaatcctcatcatatccgtttacagcatatacatcagtagtgcctatattagaaatgatatttttagaataggtattcataggatcaatctcatttaatgcacctattgtagtaccgatttttcttcctaaaatattttttgagctttttgaatctatcgatataggggctttgagatatacatttccattgtaaataattaacggaaccatttttgtggatttggttttttcttgaatatttggtgtttggaattttggaatgtatactgcattcgaactaaaacttctcaaggttgaattaagggacaaagccccgttcttgttagaattatcattagtagtggtcgaagttgttgcatgttgtgatgaatttatatcgtttgaaggtgttaaattattgtcatcagaattttgtgaaactgatgctatatttttattagtgttagtatttcctgaaggtgtctctttagaatatttaactttattattactactattattattattattattattattattattattattgttatacttattgttagtacttggcgaattatcatgagaatttgaactattttttataccagcagagttttcagcttttacatttgatttactattatcaatagcatggttatcatttttgttagaaacaggagaagaaattgaattatcattagtgaatttatctacttcatcttttgagacatacgtcgtatttcctgcatctatattttctggtttatatgtattgtttataattagcttaaaactagcagtgcctaaaaatattaataatacagcagcaacttttaatccaaatggataataatttacagttgtttttttccctaattgtgaagtattatttagcaattccatttttagcttgtctttaaattcttcacttgcttttattttggaaaaagagctcttaattttattcatattcaaaatcctcctttagtatagattttagcaattttcgtcctctgctaagttgtgaacctacagtagattcctttatgtttaaaatattagaaatttcagaaatactataattctcataataatataaaaaaacgatacttctatattttactggcaggctaagtactgcttggattacatcagtatcctcctgagttgtatcaacaaaatcatcttctaatgatgtagtatttttaaaataagaagactttaatttatctttacttaagtttatagcaactctaattaaccaggatttctcatgtgttccgttcttaaaatcgggtcgtttttcaagtagttttataaaaacctcttgggttatgtcttcggcatcacttaaatttttcatatatgaatacgaaattcgaatcagcatatcggaatacgtttctattaagtaatgaatgtaacctttgttattgtccaactcatccatttgatttttaccccctccaatacttaatacgatttataacaacaaaattttgcaaacgacaataattttcttagtttatgatgaatttcaatctattagaataagtatataagagtaataattgtatatagaatactttaaaagatattaataatttaatcaatcaaaattcgaaaaataatattttcatatatgtctgtcattaaactaaataacatataatataaaagcactttttctgaaatatagtctagcaactgatagggagaaatcaatgtaaaagaaaactatcagtttttagtaatagaaataaaaaagctgtgcaaacttatatatgaataatatagtaagggagatagatacatgaacaaagtattatatattaaagcaaatgcaaaaccagaaggaaaatcaagaacttttaaaatttcggatgtatttatagatgaatataaacaaaataatcctgatgatgaaattattacattagatttgtataaagaagatatagatttcttaagaagtaaggatttagatacagtatttggacctaaaaatgaggaaagtaaaaatcatccaacacttaagtatgcatatcaatttgcagaagctgataaatatgtgatagcagcaccaatgtggaatttaagcattccggcgatattaaaggcatatgttgattatataagtgtagtaggaattgcgtttaaatacacacaagaaggagctgtaggacttttagaaaataaaaaggctgtatatattgcggcaagaggtggctcatatgctgaaacaccatatgagcttgatggtatctatttaagaagtatactaggcttttttggaataaaagacattacaactatttcagctgagaaattagatgtacaaggagaaaatgttgataaaatactagaagaagctatagataaagcaaaggaaactgccaagaatttctaaatttaataatattatttattaatcattattagctattaaattaactagttaataatgattaattttatttatccggttatttttatatgtaaatgttagaaaattttcataaattataaacaaatctttttatgtagtaatcatgaattttaatgcattttctatattgtaaaataatttggtaactattaaactaaattatatatgttacaataataaatctatatttaaagatctaataagctgcaaattattctattaagattaaatgcagagagaaatatgttatacgacggaggaattttacatgaacgataaaagcatagaaattatgaaaaaaataattgaggaaaagaagcaaaaaaataataacagtaaaaataatcaaagggcaaaaaaagttataggaaaacattctaaaggtgtaaaagtgggtaacggtggaggtttatttgataagtaataaggccataaaataataaattcattacgaataaaactttcaaaagtaacttgaacagcacaaagtaagtatttaatactaaatttatattaactagaagaagtatattataaatgaaaggcggagaaacttaatgatgataataatttccccagctaaaactttagatttttctaagtttaatgagacattaccaatgactaagccatatttcttaaatgaggctagagaattagttgaggagttgaaaaaatatgataatttctctttggaaaagcttatgaaaataagtcctaagctagctaaattaaatacccaaagatttcaaaattggtcagagtctttagaatctgcgagacagtgtctagttgcatttaaaggtgaggtttttaagggaattgatgtagggagttatacgatggaagattatttttatgccaatgataatctaagaatcttatcaggactttatggagttttaaagccttttgatggaataaatctttataggttagaaatggcaacaaggctaggtattggtgggtttaaaaatttatatgattattgggggaataaattaatagataatattatgaaagatatagaaagacgtgaaaataaggccattgttaatttagcttcttatgaatattttaaagcaatagaagatattaaaacaataggagacataagggttataacaccaatatttaaggaatatagagatggagaatataaaataataactataatggcgaaaagagcaagagggctgatgacctcttttattataagaaataagatagaagatttagaagaattaaaagaattcaatcacgatggttatgaatttaatgaagagttatctaatgaagcagacttggtatttactagagatatacataataggaactagataattttggatttacttgcttttagacaagctaatttaatgtattttacataaaggaggtgaaattagatgattgatatacttttattaggttgcggaggtggaatgcctatgcccaatagatttctatcagctacactaataaattatagaggaaggaaaattctggttgactgtggtgaaggaactcaagtatcaatgagaatatcgaatacaggatttaagtctatagacattatttgcattactcatatccacggcgatcatattgtaggacttccaggacttcttggaactataggaaatagtggaagaactgaacccataacgattataggaccagaaggaataagagaaacagtagaaaaattaagagtaatagcaaattggttgccttatgaaattaatataatagaaaatcctaaagatacctttaaattatttgatggtaatataaatttagatgtagatatatcagttctagagttagatcattcttcaccatgtataggttattgtttttattttaaacggcagccaaaatttgatgtagagaaagctgaaaaaaataaagttcctaaaattctgtggaataggttgcaaagaaatgaagaaaatattgtgctagatggtgctttatatactaatgatatggtaacgggagaagagaggaaaggaataaaagtcagtataattacagatacaagaccaattaaaaatataatagaatttattaatgatagtgattatttcatttgtgagggtacttatggagaggataaagatttacctaaagctattaaaaataaacatatgacttttagagaagcagctgatttagcactaaaaggcaatgttaaaaaacttttattaactcattttggaacggccatgaacgagccggaagaatacttaaataatgcaaatgaagttttcgataaaactataattggctttgataggtataaaacaactttaaattttaatgaagattaatccaggagaaacataaaaccgattatgaatattagttttatgtttttttacttttagtatttgagtacattaatctaaatgtgtatatggtttttaagttatacttgatagtaagaagattaacatgaatttgagttagttgtgaatttgaaaaatgaaattatataatttttacatatataaatagccaatgtaataaaaaaagagtataatatggtagaaattatataataattggagacgaaagaaaaaggagaaatcaagaaatgtttttaaaaaaaatatgttatgttttttatatgctgtgggtaaggataaaaggagttaagcatacatttattttgagaactcagggtgatgaatctgctgaggagtatgtaagaaaaactgcatatctttggagtaaattcactttaaaaataataggaatagaattagatgtgacgggtacggaaaacatacctgaagagcaatgcgtgtttgtaggtaatcattcaagtatattagatataataatattgctttatactgtgaataagaagatgggatttattgctaaaagggaattgctaaaaactccaatactaggttactggttgaaaaagagcaaatgtgtacctttagacagaagtaatacaagagctgccattgcatcaataaatgaagcaattgaaaatattaagaatggaagttcaatggttatatttccagagggaactagaaataaagaaggaaaagtagggcaattcaaaaaaggaagtttgaaattagcaactaaatctcaagctatgatagtgccagtaagtatagatagggcttctagagcatttgaagatactaggaaatttaaacctacaaaaataaaagtggtatttgggaaaactattgatactaaaaatttatctaaagaagaagaatataatttagcagagaatataagaaatacaattatagataacttaaaataaagaatagttaataatttttagaactaaattatttgtattaatactaatgcacaattttcagtaaataattttacgggaagaagaaatttattttatataataattattattgtaattatagataaaatttaaattatgttttttctttgagattacttagttgaatattgtgcatttgttttatattacttccaaataatttatgtgatatactctaagtaaatactagtagaagattaaggtaaataattattttataaataaactataaggatgatttgatgaaaaagacaatagggattttagcacatgttgatgcagggaagactacattttcagaacaagtactttatcatactaaaagtataacaaatagaggacgagtagatcataaagactcatttttagatagtcataatatagaaaaagaaagaggaataactgtattttctgatcaagggacttttgaactgaatggttctacgtattacttaattgacactccaggacatattgattttagcacagagatggaaaggtctatagaaattatggattatgcgataatcattataagcggagttgaaggagtacagggtcatacaaagacagtgtggaatttattaagaaaatataagattccgactatatttttcattaataaattagacagaactggagcagataaagatagagttataagagaaataaaaagagatttatcgagtgatgcgtgttatatagataataattttatttatgacagcaaaaaagaaatagatgatataaacaaatttgatgagttcaatttaaatgagtatttaatagaatttataagtgagcataatgatggacttttagaaaaatatattgaaggaaactatgattatgatctttggataaaaacgtttatatcactcataaaagaaaacaaagtatttccatgttttgggggatctgcacttcaagatgatggaataatagaatttctaaatattattgataaattaacatatacagagtataaaagtaatgaaaaattttctgggcgtgtatataaaattcgtcatgatgaaaatggaaatcgtgtaacttttattaaagctttaaaaggaaagttaaaggttagagaggaagtaagctatggtggtcaattcgtaaaagaattagatcatgtacaaaataattctaacgaaattactgaaaaaataagcagtataagaatatataatgggaaaaaatttaaagcagtagatgttgtagaagctggagatttatttgctgtgacaggtatttcaaaggcagtagcaggagatggtattggggatctaaaagaaaaaacacaatacgaaatgactccaaccttaatgtctaaagtgatttttgataaaaattgcaatgctcgtgaagttttaaggtatttcaaggtgctagaatcagaagacccatcactaaatgttacatggaatgaaatttttcaagaaatcgatgtacatgtaatggggaaaattcagctagaggtattgaaggagttagttaaagaaaggtttagtttaatagttgatttcggtaagtgtcaaattatttataaggagactatagcagaagcatctataggtcgtggacactttgaaccattaagacactacgcagaagtgcatcttaaacttgaaccattgccaaggaatagtggaattgtttttgaaaataaatgtcatgacgatgatttgactcaaggaaatcagaatttaattagaacgcatatttttgagagagagcatcatggtatattaacaggatcgtctataacagatataaagttaacactattaactggaagagcacataataagcatacttgtgggggagattttagggaggcaacatttagggcattaaggcaaggattagagaaagcttataatatactattggaaccatattataaatttgtaatagaagcctctaatgaacatgttggaagaattttagcagatattcaaaaactaagtggaacttttgaacctatagaaatgctagaaaataaagtgataataaatgggaggggaccagtatcaacatttatggattacagtatggaagttatagcttttacaagagggaaaggcagcataaacttaatatatgatggatatgatttatgccataatagtgaagaagtaatagaaactaaagcatacaataaaaacgctgatattgaatatacgtcaacatcagtattttgttcgcatggtcaaggctatttggtcacatgggatagagctgatgaggaaatgcatattgaatttgatgcataaataagttactatagtaaatttgcatttaggtaattactcattttaataattataatgcaaatttaataatttggagataaaatgaaatataaattggagtttgaaaagaagattatagaatttgagttaattcggaggaaaagaaaaactatatgtattaaaattgaagaaagtggaaaagttgttgttagtgctcctttaaaaactagcaaagattatattatgttagttgtgagaaaaaggtcagattggatttttgaaaagcagaaagaaatgattcaaagaaattcaaaaaagactaagagagattttacaccagaaagcacatttatatatttaggaaaagagtattcttttaaattaatttttgatgaaaaaataaagaacatatctattcaacttagtggaaattttaataatgtatatagaaatggtgaagagctattaggagatatagatatcagtaatgaggagaaatgttttataatacacacaaatacaatggaaatagaaaaattaagggcagcatttgaaaagtggtatagaaaagaaactttggagattgttacacaaagaataggttattattcaaagaattttagagacaaggttacaggtataagagttaaggaacaaaaaagaagatgggcaagctgcacatggaaaaatgttattctatttaattggagatgtagtatggcaagacctgatgttttggattatattgttgtacacgaaatgtgccatatggaccacaggaatcattcaaaggatttctggaatagagttcatgaaataatgccggattataaagaaaaacatgaatggcttaaattaaatggattaaatatgtatttataggataaacactgtaaaatataatatgtggattttgaggtaacactttgtttttgtatgttacctctttttataattacatatttgtagattagcctatataatattttcatctaattctgtaagttcttgtgtagatgcatctatatgcaaattgtacgctaaacctaagacaactaaaagtcccccgatgattttggctaatggaatagtattttgtatcacacaatccaaaatgattccagtaaaaagttgtccaataaatattaataaagtggcataaaatgaggtcatctttggcgttataacactagataagatgacaacaattactcctaatagaccacctaaataagcataaagtggaagagtgcgaaattgttcaagtaaaaatttatcttttataataataaataataatattgatgcaactaaaccagtaatataattaaaaaagcttgattgtactaaccctaccttctcagaaagtctagtatttagaattcttgaaattactacaatagcgccagctgctatcgaaattaaaacaaaaaacatagtaataattgctcctttcttttaaaaaaatgacatgataaagattccagctgttataactaagaggcctataaattttttcttattaaaattagactttggcacatctaagaatccatagtgatcaaaagctaatgaagttaatagttggcctagaagtcctaatgcaacaggaagagaaactccaagagctgcatagcttaagttattaaacataacggtgaaaacactaatagccccagcaatataaagatataatggtaaattattcttaaaagtaattttaatctttttaaagataactattcctataacaattattaatcctacaaagtgaattacaattaaagaagaatagttgccaagtccgtcagataatttagcgttgaaagcaatcataatagttataagtacgcctattagtaatgataaaatattatacataagtgctatctccttaaataaatttattattttgtttataaatagttttaagagttattttgataggaaagttgctctttatattgtaaattactataatgagatttatataggacaaatgtcatgtttaaaattaatttttttattcaatatttattaggagttgacttcattgataaagatagaagataatattaggatttcagaatatataaataaaaataaattagaaaacctattttcagaagatatgggaagatatatggaactatatatgtttaataaaaatgaatatatctgtagggaagaagagattttagaaaatatgtattttttagttgagggaaaagctaaagtatctaagcatctagaaaatggtaaatcattattaatatcattttatagtccgattacaataattggagatgctgaatttgtgagaaataatccaacagattgcagtgttcaagcaattaaggacacttactgtataggaattagatttgatattgtaagaaaaattctaataaatgattgtaagtttttggtgaatttatgtagctatttgagtgagaaattaacaaatagcagtactaatacttcaataaacttattatatccacttgagaataggcttgctagttatataatagcattctctgaaattgaaaattcaaatactagaaaaattatatttagagaaaattatattgaaatagcagaattgctaggaacaagttataggcatttaagtagaacattgaataagctttgcttagaagggattttgaaaagaaataataaggaatattttattcaggattatgataaattattgtatttagcaggagatttatataaataacagattgttgtatttacttatttttaggatccaccagatatataattagcatagattgatgcaaaggcttatttagataaatatgaattgaattatatatttaagaatggtattaaaaaatgtcctctactaagtttaaaattatttttagtagaggacttttattcatacaaaattttgatttagtattttcaaaactgctagtggtctgaattttatatttctacatttcgtcttcttattttaaatccaattgcgccctcaatttcgttgacgtcttttatgttctttggatctataaacatgcatgtatagccgctttcgccagctcttccagttctaccaatacgatgtatataactttccacgctttcaggaatatcgtaattataaatatgtgttattccatttatatctagtcctcttgcggcaacatcggtagcaattaagtattgaatttctgcatttctaaaagatttcattattctctctcttttattttgagggatgtcactatgtaatttttcgcaattatatttacgagtatgcaagactgcttcaagttcatcaactcttctttttgttctacaaaatataatagccataaatggattatcttcatctagaactttgcataaagcatctcgtttttttctatcagtagtttcaacaatatcttgttctatagcatctagagatatatcatcttgttttatgaatacctcaataggatctttcatatatctataagctagtttttttacagaagagtcaattgtagctgaaaagcaaagaagttgtttttttctaggcatcttacttataatcgattcaacttcgtttttaaatcccattagtaacatttgatctgcttcatctaagataaaagtttttaacttacttaagtcgatagtttttctttctagatgatctaatagtctgcctggagttgcaataattaagtgaatattattatttagtttttttaactgcgaagcaatatctttacctccgtaaacaggtaatatattgatatcattaaattctttgagtttgttagcttcattagttatttgtattgcaagctctcgagttggagtcaatatgagagcctgaatttcattagattttgaatttatattttctaaaagaggaagtaaaaatgcaagggttttcccagttcctgtagctgcttctgcaatgacgtctttaccatctcttattttggggatactttgcttctgtattggtgtgggatcagcaatccctgatttatttagtattttgattaaatcgtcactaagacctaattgtttaaaattcattattttcatacctttcataatttacaaataaagtatcaatttaagtatttctttttatgttagacactattctttataatataattatctagcattaaaagtcaatctactatataaaagagttttacaaaataataaaatgtgttaaattataataggaagaataaaatgtatttacaattatgggaaaaagatagtattttatatatttataaagaaagatttgaagaaaatcgtatgtaaaacaaaacttttaatagttgattttctaaatgtgtcttaatataattaaatatagaagaaaggcaagatacggtgattttatgaagatttcaacaaaaggtagatatggattaagagcattaattgatatttgtatattctcggtttcagagatggttactgtaaaaagtatttctgaaagacaaggaatatctgagagatatttggaacaaatattttcttctttaagaaaaggaggcattataaatgctaagaaaggagctcaaggaggctactttttggctaaaagttctagagaatttacaattggagatatattaaatgttctagaaggtgatttacttctaattgatatagagaatgatgaaaatgaaatagaaaattttatgagcgaaaatttgtggaatgttataaataataaaataattaattttttcaattctataactttagaggatttggttaatgattataaaaaatacaataaagaagatatgtattatatttaatcatgatttagtagcagtagatatatatttactgctactaaatatgtactgcctaccattactgtaggcttattttattttagcttaatgctttttaatttgttttttaattcaaacatttctaattccaaggaatctatttttttatctaagatttctatacgtttagagtcaattatcttagatttttcatctaaaattctatctatatcggccataactacaagtaattttttaaataaatcatatgctgtttccatatgaaaactcctttcattgaaatataaataatttagaaagagtaatggataattaattactaaggtagtatattcaatttaaatatttattgtgaattatatatttctataatgtttttagttaatattatagataaattatctatgttaaaagggcttgtattattcttaagactatgttattataatttcaataaattaaaacctttgataagaatagtagataataaaacttagtgtaaagagagttcgatgtttggtgagagtcgagtactgaagatattattgaatgggtctttgaggtgacattttgaaatattaagagtaggaatgtacgggaagtcagccgttaaaatgacaggatataattatggggattttgtgtttgactgaatttcataatagtatctgatagcatatatacattaggtggcatagcgaaatttatacatttcgtcctatttaggacgggatgtttttttatttttaataagtttaatatgttatttgttcttataaaatacttttgattctattaaatatagagttagaagtaaaagtatttactattcgccatattaaatttgactattatttaaagattaaagtagctatgagaaataccgtttagattgtatttgattttgggtggcataacgagtcacttcgtcccaatattcgggatggagtggctttttttatataatttaactaaaattggggggagaatcatgattaatatttcaaaggaaacttttaatcaaaaaaagaaggatgaatatatattttcattaataagtgaatttagaggagatgaaattactcctattaaaatttttggtggattcaaaggtaaaagaaaatttattttcgaaagtggaagtaaagaaaattatttcggcaggtattcgtttttgggagaaaatccctataaagaaatttgtggggatggaaaagaagaaatagatgaactcaaaaaagaaagtagattaaagtttgataatagtactaatattttttcatttaaaggtggggctataggatatatgggatatgattccatacagttttatgagaaaaaacttaattttaataacaaagatgatttaaagcttcctataataagatttaatttttataacagatatatttgctacgatcattttactcataaagtttatattatagacaacatattaaaaaacgatgctcgagagtatgatgaaataatcgaatcacaatatgaatatataaatagtctgctttataagccgatactaacagagccatcgaaaggaaagaaagatgtttctttcagatttcatacatccaaagaagattttgaagaaaaagttagaaaagcaaaagaacatatattggcaggcgatatattccaagttgtattatcacagagaatgacttgtgaaactgaaaaaagccattttgagatatatagaaagcttagagaagagaacccttcaccgtatatgtacttaatagattatgaaagctatcaagttatcggatcatcaccagaaagtttggtatcggtgagacatggtaaagttatcacaaatcctatagctggaactagaaaaagaggcgaaactccagaaattgataatgcacttgagaaagagttgattgaagataaaaaagagcttgcagaacatattatgcttgttgatctaggaagaaatgatataggtaaagtaagcaagataggaacagttaatgtgagcgattttatgaaaattgagagattttcgcatgttatgcatattactactaaggttgttgggaatataaaagatgatttggatggatttgatgcattagcagcctgccttccagcaggaacagtatccggtgctcctaaaatcagagcaatggagatcatagaagatcttgaagattttaaaagaggaatttattcaggggccgttggatatttttcttatggaggaaatatggatacagcaatttctataaggacgttaatattaaaagataaaacagcctatcttcaggcaggagccggaatagtatatgattcagttccagaaaaagaatttgaagaagttcaaagtaaactaatggctttaaaggaggctttaagatgattgctttaatagataattatgattcatttacatttaatttatatcaatacttaagtgaatttgcagaaacagtggtctttagaaatgatgaaataactgtagagaagttgagagaactaaatccaaaaggtatagtaatatccccagggccaggtattccagagaatgcaggtatatcgatagatgttgtaaaagaattaggaaataagattcctatcttaggtatatgtcttgggcatcaaagcattgcagaagcttatggaggaaaagtaattagagcaagcgaaatttttcatggcaaaacatcaaaaattcaagtaaaaggaaaggatatatttgaaggaataccaagaaaattagaggttatgagatatcattcgcttatagttgagaatagttcacttccgagctgtcttgaagtactagctttaactgttgaaggcaattatataatggcacttaagcataaggaatacaacgtttttggacttcaattccatccggaatcaatatatacagcaaaaggtaaacatattattggaaattttgtgattaatatttgtggggacacattaggtgattaaaattaaatattaaagaatgtgatattaaatgtgaaagcgctgaaataagcaattttataaattttaagggggcattaaaatgatcataaatgatgcaatcaagaagttggctttaagggaagaattaaccgaagatgaagtaagaggtgtaattaatcagattatgaaaggggaagcaacttcgtcacaaattggaggtttcttagttggtcttagagtaaatggggaaactccaaggcaaatattaggtgcagttaaagcaattagagataatggggtaaaagttgaaatagaaaacacagaacatttgattgatacctgcggtacaggaggagatggttcaaaaacttttaatatatctacagcagtagcaatagttgcggcaagtggtggtgctaaggttgcaaagcatgggaatcgcgcagtttcgagtaaaagtggttgtgcagatgtactagtcgaacttggaataaatattgattttgatgaaattcaaagtaaaaaaatcattgaggaaaatggaatggcatttctatttgcgccaaaatacaatggtgctatgaagaatgtatcaaaagaaagaaaggaacttggaataagaacaatttttaatttactagggccattagcaaatccagcaccaattactgggcaactaatgggagtatatgatggagctttactaaaggatattggggaagtattgctaaatctgggattaaagagagcaatgattgttcatggtgatgatgggttagatgaaattacgattactacatcaacaagtatatgtgaagttaaagatggaaaaattaaaaattacaaactagatccagaaaagctaggttttaagaaagctactttagatgatattaagggtggagaagcaaaagaaaacgcagaaataataattaaaattcttaagggggaaagaggtcctaaaagagatattgtagttttgaactctggggccgcattatacgtagcgaacttagttgattccatagaagatggtattaaaaaagcatcagagctcattgattcgagagcagcttataaaaagtatgaggaactttctagtttgcaagtgatagtttaaataataataaagggggcaatgtttttgattttggatgatattattgaaatgaaaaaaataagggtagagaagagaaaaaaagaaattcctatgaaagaattagaaaaacaagcattatgtagagttgaaaatgaagtagaagcaagttttagaaatccttttataaaggtattaagaaaagatgggttatcagtaataggagaatttaaaaaggcatcaccatctaaaggcgttattgtggagaattttaatataaaagaaatattaaactattatacgtatattggaatagatgtattttcgattctaactgaagaagatttctttttaggatgtgatgattatttaaaagaaattagaaaaatttcgcatactccaatattgcgtaaagattttataattgacttctaccagatttatgagtcgaaagttttgggcgcgaatggaattttgcttattgctagtgttttaggtgaaaggttgggggaattttacaaagaagcaaagagatttaatttagaaccattagtagaaattcataataagacagaactagatttagcacttaaatatgattgtgaaattattggagttaataatagagatttaaaaaatttcaatgtttcgttagatataactaaagaattaattcggtgtattccaaaagataagataataatagctgaaagtggaatcatgagtatagaagatttgaatgtaattaaggaatatagagtagatggagttttaattggagaattatttatgagaaaaataaatgattctgaatttaaagctaaatataaagaatttagaaataataagtaatttataaatctaaaataatattagattatgtgaggatttgatatgattcaagttaaaatttgtgggataactaataagaatgagattaaatatttaaatatattaaagccagaatatatgggatttgtttttacaaaaagtaaaagacaggtaacagtaagagaagctaaacagttatctaataatttagataaacaaataaaaatcgttggagtatttaaagataattctatagatgaaattctagatgtaattaacatactacctttaaatattattcagcttcatggaaaagaagatgaaaactttatatcatcgttaaaggcaagagtggagaaatcagtaagtatatggaaagcattatcaataagcgatgctgaaaatataagaaaatatgcagatcataagtatagagattcaattgataatatacttattgatggggataaaccaggtagtggagaaacttttccattagaagatatatgcgaattattaaaagtagattctaacaaggaaaataattgtaatctaactaacaatacctgcagtttctttttggcaggtggtataacaccagaaaatgtagctgaaagaatagtgaaagtaagtccttatggaattgatgtttcatcagggatagaaataacaaatgaagatggaactagaacaaaatcttttgaaaagatgagaagtttaattgaaaaagtgagagcaattaatattaattgaatcaagaaaggcggaaaagtaatgaaaggtagatttaacgaatttggggggcaatatgttcctgaaactgtaatgaatgcacttattgaacttgaagatgcttacaataaggtgatagatgataaagaatttatggatgagtacatgtattatttaaactattatacaggaagaccaagtccactttattatgctgaaaatatgacaaaagatttaggtggggcaaaaatttatttaaagagagaagatttaaatcatactggcgctcataaaattaataatgctttaggacaagtacttttagctaaaagaatgggtaagaagaaagttatagcagaaacaggtgctggacaacatggcgttgcaacagctacagtagcagcaaagtttggcttggaatgtaagatatttatgggagaagaagacataaagagacaagctatgaatgttaagaagatggaacttttgggtgctgaagttgttccagtattaaatggagtaagaacattaaatgatgcagtaactgaagcgattagatattgggcctcaaatgtagaagatacatactatgttttaggaacagctgctggtcctcacccatatccaactatggttaggaatttccaaagagttataggtgatgaagctagaaagcaaatattagagcttgaaggaaggctaccggattatatcttagctccagttggtggaggaagcaatgcaataggaatattttatccatttattcacgacgaggaagttaatcttattggagttgaagctgcaggtaaaggtattgaaactggagaacatgcagcaaccattacaaagaaggaaaaaggaatcttacatggaatgttgagttatgtacttcaggataatgatggtggagtgcttgaagcatattcaatatcagctggtcttgattatccaggagttggacctgaacatgcatatttagctgaaactaatagagctgaatatgaaagcataacagatgaagaagctgtaagagatggatttatgtatttaacaagaatagaagggatagtaccagcccttgaatcatctcatgctgtagcatatgctaaaaaattagcacaaacacttagcagcgataaaatcataattgtaaatatttcagggagaggagataaagatatggatgctgtgcttgcatatctaggtgaaaaataatgaatagaatagatttatcatttaataaagtaaaagaagaaaatagaaaagctttaataccttttgtaacatgtggggcagatttcacggttgaagaaacagctgatttgatagtgtctttagaaaaagaaggagcaactatagttgaaattggagtgccttttagagatcctcttgctgatggcccagtaatacaaaatgcatatactaaagcgcttcaaaatggaacaaaagtaaaagacgtatttagatgtgtagaattaataaggggaaaatcagaagttccgattgtattaatggtgtatttcaatgttgtatactttactggagtagaaaatttcctgagaatagcggcaaaaagcggtgtagatgggcttatagttccagatgtccctctagaggagaggggagatcttgataaaatttgtgaagataattgcatatacttaattcctctagtggctagaacttcaaaagatagaatagcagcaataacaaaaggggcaaaaggttttgtatattgtgtatctacaaatggaactacaggggaaagaaaaactttggattctggcactcatgaatatttagaagaagttagaaagaacgtagatataccaatgtgcatcggttttggaatttcgtcaaaagaggtagtaaaagaagttaaagactattgtgatggggtaattgtaggtagtgcaatagtgaagagaatggcagaaggcaaagaagcagtaatagatttcgtgaaagatttaagtgatggtcttaaataatataaagtatatttaatattatgatattttcagttaaatccaccttatcgtaaagataaagtggatttcttattctgatgttaaattggctgaaagagtaaaaagtataaataggatatttgctttacaagtcccatttttcaatttgacagctaattatactttgcgtacatattccttttttgtaccagttacatgagctacatattttattaaatttagcttcactaaaatttttgtaaatagtatctataatttcatgaaacgtatatactttattttctttgatattgtatgttcgtaaagtattataatctaattcattaactttattttgagtgatgcagcaattattaacttgtctattaggacaattattacataggatatcacatcctacaatgaacataactttagaataaggattttccttaattaaagttaccaatttatccatgcctattgtaaaatccttactgtatcctaatccttgataaaaaaataagcaatttatatgatgtggtctaagtaataacattttttataactccatctaatttttcttccagtatatagcatataaaaatagtttgtcaaccttatggaattgtaaggttgactattcgcatgattgatttatgaaatagtttatgttgaaaataaagtttatgataaagaagtctataaaatatctggatatgaattttttataggagtaaaatataataatacatcagttaaaaaatagttttattaaggtgtattgaatataaatagtaaattgtaattaataatgttataattttgaggaaatgaggtgtttaagtttatgacaaaaaagactagcagaaatacagatatattaaaagatactaaaaatacaacatctcctaaagtgtattccttattagtggaactagtaaatgcggatagggaagatttagctgaagatgttctaaaaatagattatctattaacatatgcaaataattgcgtaaaggataaagatttaagagaggcaagggatacattaggaattgctagaaatagaattgataaactaattgataacagtgtgaatgttgaatacttagttcatctttatgataaaattaatttgaaattgtaaattattagagattatttaaattatatagataaaatataaatattaatgttataataaattaattttcattaagtaattgatgattaaaatataaaatgtaaagcgagaagaataaatgagatttgaaagtttagaaaaaaccataaacaaattagataatgatattgaagccttaagaagggttaaacaatatttatcaaataaagatgaaattaatgaaataagtgatttattaaataaggaaagacaagtatatgcggatgaattgtacataggtgatgctgtagcttataatgagagtttagaaatattaaagcaattgtttaataaagaattaggaaaagatgaacaagttaaattattagaagatataaaagaaatacacggaagaaagtcaccaaatgtcagtaaaaaaagtcatggacttaatgcgtggcttaagtttcttgatatccaatgtgagtggattgaaaatcctaatagtgattggtcaacattaattataaaaggatttataccaaggaataataattaaaatattttttaagaacaagtaggttttcatatttcatggaaacttattttttttattaatttttattatcttttatgtgttaataaaaaatagaatacaattagaggtaatctgtagagcattctatttttaagttattgtatacaataagtttggattactaagatatatgagaaatttataatgcaaagttaaagaaaagtcattattatgcaaagcgactgatattaatgcataactaagtactataatcagataaatatagaatttttaagaattataaaaataatttaattttatagtataaatttaaagccaatggttatagtaatagtgtaaagagaaaatatgtagtaaaagataaagttattaaaaacaactatatcttacaaaactatcataaatttaagatgaaaaagatggaaaagttattgacgagaataaatagtaatggtatgatgtaattcgtcgctgaaagcacgaaattcaataacttataagctgaaaaaatgtttgaaaagttttaaaaaaggttgttgacaaagtctgaaagcgatgatatactgagtaagctgtcagaaacgacagaaacttgtaaagccttgtaacaacaggctttggaaagaaaattggtctttgaaaattgaacagaataatataaatacatttaagtaaaccagcaattctttatttgagtaagctaagattaaactttttattgagagtttgatcctggctcaggacgaacgctggcggcgtgcttaacacatgcaagtcgagcgatgaagctccttcgggagcggattagcggcggacgggtgagtaacacgtgggtaacctgcctcatagaggggaatagcctttcgaaaggaagattaataccgcataagattgtagtgccgcatggcatagcaattaaaggagtaatccgctatgagatggacccgcgtcgcattagctagttggtgaggtaacggctcaccaaggcgacgatgcgtagccgacctgagagggtgatcggccacattgggactgagacacggcccagactcctacgggaggcagcagtggggaatattgcacaatgggggaaaccctgatgcagcaacgccgcgtgagtgatgacggtcttcggattgtaaagctctgtcttcagggacgataatgacggtacctgaggaggaagccacggctaactacgtgccagcagccgcggtaatacgtaggtggcaagcgttgtccggatttactgggcgtaaagggagcgtaggtggatatttaagtgggatgtgaaatactcgggcttaacctgggtgctgcattccaaactggatatctagagtgcaggagaggaaagtagaattcctagtgtagcggtgaaatgcgtagagattaggaagaataccagtggcgaaggcgactttctggactgtaactgacactgaggctcgaaagcgtggggagcaaacaggattagataccctggtagtccacgccgtaaacgatgaatactaggtgtaggggttgtcatgacctctgtgccgtcgctaacgcattaagtattccgcctggggagtacggtcgcaagattaaaactcaaaggaattgacgggggcccgcacaagcagcggagcatgtggtttaattcgaagcaacgcgaagaaccttacctagacttgacatctcctgaattacccttaatcggggaagcccttcggggcaggaagacaggtggtgcatggttgtcgtcagctcgtgtcgtgagatgttgggttaagtcccgcaacgagcgcaacccttattgttagttgctaccatttagttgagcactctagcgagactgcccgggttaaccgggaggaaggtggggatgacgtcaaatcatcatgccccttatgtctagggctacacacgtgctacaatggctggtacagagagatgccaaaccgcgaggtggagccaaactttaaaaccagtctcagttcggattgtaggctgaaactcgcctacatgaagctggagttgctagtaatcgcgaatcagaatgtcgcggtgaatacgttcccgggccttgtacacaccgcccgtcacaccatgagagttggcaatacccaaagttcgtgagctaacgcgcaagcggggcagcgacctaaggtagggtcagcgattggggtgaagtcgtaacaaggtagccgtaggagaacctgcggctggatcacctcctttctatggagaaatctagatcagcatgatgtctgactagtacagatacattattatgtatcaaaatataaaatacttgctcaaaggttacttaagtatttgttctgttcaattttgaaagactaagtctttcaaaatgcgtagcttagtagcgataagtgcgaaaaagcgaaagttttatgaaatgaagcgtgcttcatgtacgtgaatgagtaaaatttgaagctgatgaagcaattaaagttaataagcaagcagatgttctttgaaaattgcacatagatttaatgtatatataaaatacaacaaagccaagaataaatattctttgtgaaatgattaaaccaaattggataacgtaatttttgtagtagatactaaaatgcgtactaatttgtgaagtttaataatggctagtacaaggaaacgagaaaattatgaaatgagcagtacttaaacgtacgcgagtgagtaatttttgaagttgacgaagtaatagacattagtaaacgaacaaaaggtcaagctacaaagggcgcatggtgaatgccttggcatcaggagccgatgaaggacgcgataagctgcgataagcttcgggtagacgcacatagtcagagatccgaagatttccgaatgaggaaactcacatgggaaaccccatgtatcataaagtgaatacatagctttatgaaggtatacccagggaactgaaacatctaagtacctggaggaagagaaagaaaaatcgattttcttagtagcggcgagcgaaaaggaaagagcccaaaccagagatttatctctggggttgcggacagaacataacgagaaatcatagttaattgaacacaactggaaagttggaccacagtgggtaatagtcccgtaagtgaaaactatgataatcagttctgcaccagagtaccacgagacacgtgaaaccttgtgggaagcagggaggaccacctcccaaggctaaatactacctgatgaccgatagtgaagcagtaccgtgagggaaaggtgaaaagaaccccgggaggggagtgaaatagaacctgaaaccatgtgcctacaaccgatcagagcaccttatgtgtgtgatgatgtgctttttgtagaacgagccaacgagttacggtatgtagcgaggttaagtacttaaggtacggagccgaagggaaaccgagtcttaatagggcgactagttgcatgctgtagacccgaaaccgggtgacctatccatggccaggttgaagcgagggtaaaacctcgtggaggaccgaaccacgttgctgttgaaaaagcatgggatgagctgtggatagcggagaaattccaatcgaactcggatatagctggttctcctcgaaatagctttagggctagcgtcggaaaatgtgagtagtggaggtagagcactgaataggctagggggcatagcgcttaccgaaccttatcaaactccgaatgccacatactatcagtccggcagtcagactatgaaagataagttccatggtcaaaagggaaacagcccagatcgtcagctaaggtcccaaagtgtaagttaagtggaaaaggatgtgggatttctaagacaactaggatgttggcttagaagcagccactcattaaaagagtgcgtaatagctcactagtcaagagatcctgcgccgaaaatgtccggggctcaaacttaccaccgaagctacgggttcacgtttaacgtgagcggtagaggagcgtcgtaatcgggctgaagtcgtaccgtaaggagcggtggactgattacgagtgagaatgttggcattagtagcgagatgtaggcgagaatcctacaggccgaatatctaaggtttcctgagtaaagtttgtcttctcagggttagtcgggacctaaggcgaggccgaaaggcgtagtcgatggacaattggttgatattccaataccactataatcgttattatcgatggtgtgacggagaaggataggatgtgctagctattggatgctagtctaagcgtttaggaagttgggattggcaaatccgttccaacaattctgaggcgtgatggggaaggttctacggaaccgaagtatctgattccatgcttccaagaaaagcatctagaaagagaagtagtgcccgtaccgcaaaccgacacaggtagatgaggagagaatcctaaggccgacggaagaattgcagttaaggaactaggcaaattgaccccgtaacttcgggagaaggggtgcctgagaaatcaggccgcagagaataggcacaagcaactgtttaacaaaaacacaggtctctgctaaagcgaaagctgatgtataggggctgacgcctgcccggtgctggaaggttaaggggaacacttagcaaagttttgcgaaggtgtgaacttaagccccagtaaacggcggccgtaactataacggtcctaaggtagcgaaattccttgtcaggtaagttctgacccgcacgaatggcgtaatgacttgtgcactgtctcaactgcaaatccggcgaagttgtagtgcgagtgaagatgctcgctacccgcgattggacggaaagaccccgtagagctttactgtagcttagcattgaatttcggtattgtctgtacaggataggtgggagactgggaaactagggcgtcagccttggtggagtcgttgttgggataccaccctgatagtattgaagttctaactggatgccatgaaactggtgacaggacattgttaggtgggcagtttgactggggcggtcgcctcctaaaatgtaacggaggcgcccaaaggttccctcagaacggtcggaaatcgttcgaagagtgtaaaggcagaagggagcctgactgcgacacctacaagtggagcagggacgaaagtcgggcttagtgatccggtggtacctcgtgggagggccatcgctcaacggataaaagctacctcggggataacaggctgatctcccccaagagttcacatcgacggggaggtttggcacctcgatgtcggctcgtcgcatcctggggctgaagtaggtcccaagggttgggctgttcgcccattaaagcggcacgcgagctgggttcagaacgtcgtgagacagttcggtccctatccgtcgcgggcgtaggaaatttgagaggagctgtccttagtacgagaggaccgggatggactgacctatggtgtaccagttgtttcgccagaagcatagctgggtagctaagtcgggaagggataaacgctgaaagcatctaagtgtgaagcccacctcaagatgagatttcccatagcataggctagtaagaccccttgaagactacaaggttgataggtcagaggtgtaagtatggtaacatatttagctgactgatactaataggtcgagggcttgaccaatataatcaagttgtaatatatattaaagaaactatgtgcaattttgaaagaacaaggttttttcaaaggaataattacagtagtagatttatgtaaatgtagtataagcgtaaattaagagtcttttttcaaaggaaactcgactcacattcgttcgctgagtgctaatttacacaaataaggaatacaaatcgcaaaagcgatttgcataagttcgttaaaccaaatcgtagatttgggaactcacttaatctcgtgatgatggcatagaggtaacactccttcccattccgaacaggaaagttaaggtctataacgccgatggtactgcatgggagactgtgtggcagagtaggacattgcgaggtaataaaaaatatgctcagatgataacttatcatctgagcatattttttattataaagttttttgatttaaaataataattaaagaatccttaaatataaaaattcagatttaaggatttgcaataactacttatacaacgtgtaactaatttttgggacacgactatactggtattaatagagataagcatatatattgaaatttatttctatgcacaattttttatatttagatttcattatatgagactgtttaagaattttctaattatcattaaattgtgattgtgataaattactttagaaggtgagattatgattaaattagtactagtaaggcatggagaaagtctttggaatttggaaaatagatttactggatggacagatgtggatttgtcagagaatggattaaaggaagcaagaagagcaggaaaaatacttaagaaaaatggttttgtatttgatgtagcttatacatcagttctaaaaagagcgataagaacattatggataatattatatgagatggatttggcatggattcctgtttttaaatcatggagattaaacgagagacattatggagctttacaaggattaaataaagcagaaactgctaaaaaatatggagaagagcaagttcataaatggagaagatttgtaaatgtaaaacctccagaattgactaaagaggataccagataccctgggaatgaatataagtacaaggatttaaatgaagaacaaatacctttaacagaaaaccttgctgatactgaaagacgtgtattagaggaatggagaggaaatatagctaaagatttgaaagaaggtaaaagagtgataatatctgctcatggaaatacattaagagctttagttaaatatttagacgatattccagctgataatgtagctaatttgaatattccaacaggaatacctttagtatatgaattggatgaaaagttaaagccaattactcattattacctatcagataaggaataagtaatatgataagttggtgtaaaaatccgaattcaagaaaaaattacaataattataataaagaaatataatttatttcaaaaacagtaaatcttttaaaattttaaattatatagatttgctgtttttgtgattttattcaaattaaatataaaattttgtactttttgtttatatatttctattaatataaagcgtataattacatagttgtggagtccagaattcaaatagggtatttttgtgatatcgtattaaatgtttgactaatataaattaatttttactaatatctttaagggggagacattaaatgataataactagaaatttaacaaaaggaaatccggcaaaattgatattgctgtttactattcctttattaataggaaatatatttcaacaattttacaatatagcagatacatttattgttggccgtacaataggcgtaaatgctttagcagcggtaggatgtacaggaagcataatgtttttaattttagggtttgctcaaggtttaacatcgggactttcaatcattactgcgcaaaaatttggtgcagatgataaggaaggggttaagaaaagttacttcacaggcatagttattagcatgataataactataattcttacaactataagtacgattctagctagacctatattagaactaatgaatacacctgtagaaattattgatgatgcatataattttgtagtagtaatatttattggaataatagcatcgatgttttttaattttttttcaaatattattagagccttgggagatagcaaaacgccattaatatacttagtggtagcgtgtattttaaatataattttagaatttgcatttatattaatattcaagatgggagtaactggagcagcttgtgcaactgttatagcacagggagtatcggcattattgtgtatgtggtacataaagagaaatttgcccatacttaagttaaagaagagtgacttaaagttatccaaagaaacttttttagaacacattaaaatttctctaccaatgggatttcaggcatctataatagcaattggtgctattatattacaatttgcattaaatagccttggggctacttctgtagctgcatatactgctgctcagaaaatagatactctcgctactcaacctatgatgtcatttggtataacaatggctacatacacagcacaaaattttggtgcggaaaaaattgatagaatcaaagaaggcgtaaagaaatgcgtttttatatcagtagcatttagtattatagtgggccttataaatacttttgcaggttattttcttacaggaatttttgttggatatgatcaaaaagaagttattaggttgtcacaaatatatttaacttcaaacggattaaattattttttactttcactactgtttatatatagatatacgcttcaaggattagggcaaagttttattccaacagtagcaggaattatggaattgttgatgaggacgttcgctgcaattatattatcacgaccgttaggttttttaggcgtgtgtatggctaatccattagcatggcttggagcatgtattccacttataagtgcatactatattagcatcaggagaatagatatagaatactcaaaaaagaaaagctgtttgtatgaatcagatatagatgcatgcaattatataagtaagtaaaagttagtttatatagtaactttgtattgtcgtatgatttatgtgataaggaatgaactaagattattggtgttaaataatcctatttcattccttattacattttttgattattttaattgtgtttaaatcgatacctctaatagagtaatttgaaattgaatattgaatttatataatattgttgaaagaattttacaaatatttgaatgtaaaatactgaatatataaaatttgtaatatatatactgagaatataaaatgagttttatataaatgatataattagaagatcgggagtgagattatggatggaaaatcagtgataaagtggcataaggatataatcgtaataattatgggggaaagtggaggactttagttacaatgaattaaaaatacttaatatattttgataattatattaagataaacatacatttttataaagtggatataaattaaaaatttaataaagtatttattgtaataaaatgaaaaataatatataaatatatatgaaaataaaaatgctagaattaatattaacatttttggcatttgttattaaaataaagataaaaagtgaggaacaaaatggaagataatcaaaatatacaagacaaaataaaaagttttttagaagagaataggataaatgttaaaggtggaactataacaagtgaaaagcaattatcactagttttaaatgatcttgcaatgggagattttaaaaaaggaaagctagataaggcattatatttcacagaaaaagcagctgaatttaataaagaaaattattattcatattttataaaaggtctagtatgtagaaagttaggaaaaaatgaagatgcgattgaagcatttaatgtatattgtaaagactctgatgattcattaacccacatatatatgggactttcgtatgcagaattaggaaacatagaaaatgcattagatcatcttagaaaaggcgaaaagaacatctcaaaaaatgaaaaggaagatcataaattattaatctgtgcaacttatgagtgtataggaaatatatatttaagtaaagaaaatatagtagaatttaatgagagagataaatatagtatgaactataaaagtgcggtaagatattataaaatggcactaaaaataaacaggaaaaatcctgatttaatcaatagattagctgcatgttattatcatcttgaagatttaaataaagcactatattgctatgagcaagctgctaagattgtagaagataaaagtatgtatgttgaggcaatcaaagaaatgcatgaagctggtgctaaatcagagccagcaggattttagtctataagaaaattgtatagataaaaaagcttaatgtgatattttagtaacattaagctttttttgtgttttaatgagatttaataagccaaaggtaaaaaacgttaaaatattgtatgtaaattaatttaatatattctgaaagataaagtgaaaatgtctttctagaattaattaaaagagatagagactaagaaatgcataactaatatataacaatttataaattaacttgtaaaaattattataatatttctacataacgaacgttttttaataatatcgttctaatatttatatttgtagaaaatacaaatgtctttcgtgggttgacagatgagcagatataggataatatataatttgttaataatagtcggattaaattaataaattaataattttatactttagcgattaatttatataaacaatttcaatagaaatattaaaaagaatagtaatatttaaacaaggaatagctggttaattattttctatgttttttggaaatcttattgtcaatttattatttttttgcagcgtacactttaagaaaataaaactaatactagggggcttattttatgaagaaaaaaatttctttgcttttggcgctggctatgacaactacatttacgctggcgggatgttcaaaatcaaatattaaagcaaatatagatagcgatgttataaaaattggtgtttttgagccaatgactggtgctaatgcagctgggggacagctagaagtagaaggtgtaaaacttgcgaacaagctctatccgacagttaatggaaaaaaggttgaactagtttttgcagataataaatcagataaagttgaggcagctagtgcagcatctaatcttgtagaacaggaacaagttaatgcaattataggaagctggggaagtggaaactccatggcagcaggagatgttgtacaagatgctaaggttccagcagttgcagcttcagctacaaatcctcttgtaacagctggtaatgattattactttagagtttgttttatagatccttttcaaggaactgttatggcaaaatatgcagcaaataaattgcaagctaaaaaagtagctttacttcaagaggtttcaagtgattactcagttggaatttgtaagttctttacagatgaatttataaagattacaggagataaagatgcaattatagctaaagctaactataatacaggtgatcaggattttacagctcaacttacaaatataaagagtagtaatccagatgtgatttttgctccaggtaattttacagaaggagctatgataataaaacaagcaagacagcttggaataactactccaataattggaggagatacttgggaaacgccagagtttttagatataggtaaagaagatgttgatggaacagtattttctactttttttgcaagtgagactcctataactaacgaatcaaaagtctttcttgatgaatatagaaaagaatataataaagaaccagcagcggtttcagctttatcatatgatgcatatttagtaattttagatgcaattaagagagctaattctgcagatccagtaaaaattagagatgaaattgcaaaaactaagaattttcctggtgcagcaggagtaataactatagatcaaaataacaatgcagtaaaagacgcagttttaaagatagttaaagatggtaaatttacttatcttgatacaataaaacctgaagaaaattaattaggggtgaaaatatgactttaatgaatttaagcacatttatgcaaaatttagcaaatggtatctcactaggaagtttatacgcacttatagccataggatatactatggtctatggaatattaaaacttataaattttgcgcatggagatatatttatgatggctgcatatttcggatttttcggagttgcaacatttggactaccttggtactttgcttttataatcgcagtggttataacagcattccttggaatgggaattgaattcactgcttatagaccgttaaggaatgcacctaagatttcagctttgatttcagctattggtgtatccttcttacttgaaaatttagcggttgttttatttggaggaagacctaaagcatttccagatgtgaagctatttacagatgtaatagttataggtggaatttcaattcaaagacttacttttataattccagttgttacaatagtaatactatttgttttattacacttagttaataatacgaatattggtatggcaatgagagcagcttcaaaagatgttgaaactgcaagacttatggggataaatgtaaataagacaatatcatttactttcgctattggatcgggattagctgcagtaggttctatgatgtggtgtgtaaaatatccacaaatagttgcacttatgggaatgatgccaggtcttaaatgttttatagccgctgtaattggtggtataggagatattaagggagcagttattggtggttttatacttggactagctgaaattatgttaattggatttttccctggacttacagggtatagggatgctttagcatttatactattaatcgtaatattgctatttaagcctacaggaataatgggcaaaaatttaacagagaaggtgtaaaaatgaacaataaaaataaatttttaaatatagctcttattgcaattgtatttttactcttatttgttgcaaataatagcttagactcttataaaattagaattttaaatttatgtgcaatatatacagttcttggattaagcttaaatctaataaatggatttacaggattgttttcattaggacatgcaggctttgtagcggtaggtgcttatacaactgcattgcttacaatgagtgaaaaagttaaaaatcaaaatttctttatggaaccattaatggcgccttttaatcatatatcggtaccgtttattgtagcattgttaatagctggtcttttatccgcatttatagcagttttaataggtgctccggctttaaggcttaagggtgactatttggctattgttactttaggatttgcagaaattataagaatagttattactaatatacaaggtctaaccaatggagctttgggtcttcgtggtattcctcatatgacaaacctatattggagctttggagtagcaattgtgacaataataatattgctgtcgcttataaatagttcatatggaagagctctaaaatcaattagagaggatgagattgcagctgaaagtatggggataagtttattcaaacacaaagtaataggattcgctattggtgctttttttgccggagttggaggtggattacttgggaacttaatgggaacaattgatcctaatatgtttaagttcagccttacgttcaatatactccttataatagttattggaggaatgggaagcgttacaggaacagttatatcagctttcatcgtaacaatacttggagaagctttaagatttttggatatggaaaagcaatttgatttaggaatctttagtttttcagggataccaggacttagaatggttattttctcaattttgcttatgataatagtattattctttagacatggaataatgggcacaaaagaattttcgtggaaatcaatatttaaatattctaataacaaacctctagaagaaggaggggacaagtaatggcattattaaacgtacaaaatgcgactatgcagtttggaggacttacggctgtaaaagactttaaccttcaaattaatcaaggagaaataatttccttaattggacctaatggggctggtaaaactacagcctttaatatgatcactaatgtgtatactcctacaaggggaaaaataatctttaatgatactaatattactggaatgagacaagataaaataactcaaactggtatagcaagaacatttcaaaacataaggctttttaaagatttgagtgtacttgacaatgttttaataggaaatcatgttcatattaagtcaaactgtattgaagctatgttaaagcttcctagatataaaagagaagaaaaagaaatggttgagaaatctttagagcttttaaaagaagtaggtcttgaaaagttaaaaaatgagaaagcaaattctcttccatatggaatgcagagaaaacttgaaatagcaagagcgcttgctactaatccgaagcttcttcttcttgatgaaccagcagcaggaatgaatcctacagaaactgatgaacttacagattttgttagagaaattaaggataaatttgatttaactatatttatgatagagcatcatatgaatatggttatggggttatcagatagaatacaggtttttgaatatggaattactatagctgaaggtacaccttctgaaatacaaaatgataaaaaggttatagatgcatatttgggggtagctgaagatgattaaaattgataatttagtagtcgcctatggtggaattgaagcgttaaaaggaataagcttagaggtaccagaggggaagatcgtaactttagttggtgctaacggagcaggaaaaagtactacattaaaatctatagtaggtctagttaaaccaaagagtggaactataaatttggatgatggaactgatttaactaagcttaatacagaacttatggtgaaaaaaggaatagcattagttccagaaggaagaaaagtcttttcagatcttacagtactggaaaatttaaaaataggtgcttatacaagaaaggataaatcaggtattcaagaagacttggaaaaggtatattcactttttccaagacttaaggagagaacttggcaattatcgggaactctttcaggaggtgagcaacaaatgcttgcaataggaagagcacttatgtcaagaccaaagttaataatgatggatgagccttctttaggacttgcaccaataattgtaaaagaattatttggaattataaagaaaattaatgaagaaggcatgacagttctactaattgagcaaaatgcaaatgcagctttaaaaatagctgatattggctatattatggaaactggaagaataacactaagtggctcagggcaagaattactttctaatgatgaaattaaaaaagcttatcttggtgaagctttgtaatatgagaattttcgtatttagaggagaaatagcaagtcagaaaatagaaaaatactgacttgttatttttttatttaaggaatttattttgcctttattattacaatacattaaattaaaatataagtttttagaaaaagataattttaattgaactaagagatgtatattataagaaataaatgctgggatattagaattctttgagttactattttgttgctcttattttgtacgtcaataagattaaattaatacttagatattagggggatatatatatgaaaagaaaaatttcattgcttttggttatagctatgatgacttcttttactttaggaggttgtaattcaaaatcaggcacaaaagccaatgaggatagtgatgtaataaaaataggtgtgtttgaaccaatgacaggtgcaaatgcagcaggtggacaattagaaacagaaggtgcaaaacttgcaaacaagatttatccaactgttcttggtaaaaaagttgaactggtttttgcagataataaatctgataaagttgaagcagctagtgcagctgcaaaccttattgagcaggagcatgttaatgctattataggaagctatggaagtggtttctctatggcagcaggtgatatagtacaggaagctaaggttccagctgtaggggtaacttgtacaaaccctttagtaaccgcaggaaatgattattactttagagtttgctttattgatccttttcaaggaactgttatggcaaaatacgcagctaataagttaaaggctaaaaaggtagcaattcttcaagaggtctcaagtgattactcagttggaatctgcaaattctttactgatgaatttaaaaagctaactgaggataataatgctgttgtagcaaaagcaaattataacacaggagatcaggatttctcagcacagcttacaaatattaaaggaagcaatcctgatgtaatatttgctccagggaattttactgaaggagcaatgataataaagcaggcaaggcaacttggaattacagcaccaataattggagctgatacctgggagacaccggaatttttagatataggtaaagaggatgttgaaggaactgtattttcaacattttttgcaactgagacacctataactgaagaatctaaaatttttcttgatgaatatagaaagcaatataataaggagccagcagcagctacagcattagggtatgatgcatatctagtaattttagatgcaattaagagagctaattctgcagatccagttaaaattagagatgaaatagcaaaaacaaaagattttcctggtgcagcaggagtaataacaattgatgaaaacaataatgcagtaaaagaagctgttttgaagatagttaaagatggcaagtttacttatctagatacaataaagcctgaatagaattaaaaatgtaaatactttaataaaatagataatgtatattacaattaagttccaatattgtggtcctaattgaataacttgatttataaggattctaaatgtatacttagtatttaaagatatatataataatatttatagatagaggtaaatggttgtatgttttttataggtatatttggtattgagaataaaaataaagaaataaagattttagacaatttaaactgtaaaaaatgtaataaagtttttcgtggaaagctgataaaaaattttaattatttttattttttctttattccgctttttaggtggaatataaaatattatataatatgtgatggatgtggaactaaatttagtatttcagtggacaaaggaaaagccattgagaataacgagcctgtaaatataacttattgggatcttgaggagctagaaagcagtaattatagagataatcataatagtggtatatgcaggaactgtggtatggaagttgatccaagttttcaattttgtcctcattgtgggaataggattaaattttaagaaaatcaagtagccgttgtagctacttgattttttttattctttagaaatttatattccagtaaaatctgtgcataacttaaaaaaggttgattgaatagctttggtattttaaaaagaataaaaagaaaatatattcgctaattgaaagtttcacaaaatcacgttgatttgagtaaagattgatagagaaatctttaactacagaaatatattgtaatagttattgaaatggaataacatgggttttataatatataatgataggataggtttataattcccaaagtcaaaattgacttgaggataataatttattaaagaattagtgattatgaaagaggatattagatgtttaattatataatatttcttgcaatgtttttaacggcatttgtttcggctcaactatgcatatttttattttataaaaaaagaagaatacatttaaatggtcttttaggtgttattttaagtgtttttatatatagtttattttattcttttgagttaatatgtcctaatttaacttttatgaaattgtttactggaatagagtatataggaatagcatccattccggctttttgggttatcatggctctagaatataccaataaaagtaggtatattactaaaaagctctatatgttgttattttcgttgcctacgatattagtggcattaaatattactaatgactatcatcatcttttctataaaagttatacagttgacattgcagataatctatatattgcaaatcttaaaccaggtattgtatatgttatctgcgtaatttttgtaaatgtatgcttcatagtagggaacagtttgtatttaattttttatagaaaagaaaacagtttatataaaaagagaagttttaaaatcatgcttacatcatttattccttggattggatattggatatacatgtcaaggattacgtctataagaatagatatagttccgatttttatgggagtattttgtttgatatatacatatgctttgtttaaatcaaatatctttgaaacagctaccattgctagacatgttatttttgataatatttctgaagcaatattagtgttagaccaagaaaataaaataatagatatgaataatatagcagagaaaatttttaatataaaatcaaagatgtcaataggacaagacgtatacacagagtttaaagagtatcaggaaattatcaaatatatatatgaagaaaaagaaacgagtttcaactgtgaaattaaaatcaaaaacaaactttattattttaaaggaaaacttacactaattaataataacagaggaaagggaaaagttattgttttgagtgataatactgaacaagttttaatgattaagaaacttgagtactacggtatcactgatgttctgacaggtgtatataatagaaagtatttctacaaaattgctaaagaaaaaattgaagcttgttcagataagaaacatatgtctctattaatgatggatatagataaatttaaaaatattaatgatacttatgggcatcctacaggtgatgttgttttaaaaaaggtaatgaatatttgtaaagaattattgggaaaaaaatattatataggaagatatgggggagaggaatttttaattctactagataatgctaattcagaaaaagctttagagattggtgaaacaataagaagaaggattgaaaatttggaaatactccatgacaataaatgcataaagataacatcttcttttgggatatttacatcagttagggaacgagatttggagaatatgattaaatttgcagataaagctttgtatgaagcgaagagcttagggagaaatagggtttctataaaaatggggaatagttagattaatatttaatttgtatagtaattttgttgctatatcatagatacatcaaatttaataagaaataaataaatttattataaatgttgcagcgcattgattattgcaaagtaaaaactttaaatagttactataatactatttaaagtttttttatttaaaatatttaattaagaaattcatgaactaaaaatacatttttagtttttgcttgtttcaaatctatcaacatgtaatatagaaggaaataatttcatccataacattacaactgctatagttccaatgcctccaataagagcagcgggaacagtcccgaataaagacgctgtaattcctgattcaaattcaccaagctgattagaagttcctatgaatatcatatttacagagctaactcttcctctcatataatctggagtattaagttgaacaagtgtagatcgtataacaacgctaattacatcagaagcacctaaaattaaaagagcaatgaaagatattataacagatctagatattgcaaaagctatagtagataaaccgaagaatataacagctatgaacattgtctttcctactttgtgctttaatggttttcttgcaagataagcagacattaataatgctccaacggcaggagcagatcttagtatccctaaaccaaatgaacctatcattagaatgctacttgcataaattggaagtaaggccgttgcgccaccaaataatacagcaaataaatccaaggatattgccccaagtattataggtctactctttatgaaagatattcctgcgaataaggattttatactagttggctcagatttaaaaatttctttcttaattgaaatctgatatataagaatacctgatattaaatataagataccagttaataaaaaaacttgtgtcgggccaaaaacatataaaattccaccaacagctggtcctataatgactgcaaactctgaaactgaagacattaaagcagaggctcgcgggaaaatcttcttactaacaatattaggcaataaagcttgcattggtggaccttcaaaagaatgagctaccgctataaagaaaatgagaattaaaaatcgctctttagtaattaaatcattataattcccaaaagccataataaaaataaaaacgctttgagttatttggcttaaggttactatttttctgcgatcatatctatctgatatatgtccgacaaaaagagagagaaaaagcattggtaaaaactgaactagtccaacaagacccaaataaaatgccgaatgagttaatgaatacatttgccatccaatagcaactgtaatcatttgatatgcgaaattagtggatacacgtgctgtcattaatagtcttaatgatttgtttttaagcaaagaagaattatctttagttgaaatcattatatttcagaacctttctgtatatagagtattatggctaaataaatattcataaacataagtaaaatataggttaataatatattaaatagcattattaatagtatataccggggaagaacgcgtatcaagttaataatggaattattttcttcctactcaataaataaagccataaacttataaaatttttaagtaatatattaaatggattcaggcaagaatttgtttagaatatcgtgggaaccatttcaaacgtttagtgatatgagttggttaggatatcacgagtttcatttttagaattgcagatacagttattagcaaaaactattttggatacataaataggtgtgtcactaatattaaaaagttatttttaagaagaatttatcaactgtaaataattatttatgttaaaaatatgataaaataaacattaatctagtattaaatattattaatacacataagaggaggatataatatgagttttggaaatcttcagaagataagtaatggaaagagaacttttggaataactccgcatattccaggcggttttattactatagaaactatgcaaaaaattgtggatgtagcaaaaaaatataatggtatattaaaaataacttcagggcaaagaatattaataactaatcttaagcaagaagacttggaaaatatttggaatgaacttggaatggaaccagcagttaaaacacaaaattcagttaagaatgttgaaatatgtccagctggatactgtaaaagatctaaatataacacaattgggacaggaatgaaactttcaagaaaatatcaatggatggaaatgccatgtaggactaaaataggagtagcaggctgtagaaacgcttgtggaagtgtttatagtaaagatattggagtgatagcagataaaaccggttttattgttgtagcagggggatcaggaggttataacccaagaatggcagatattattgctaaagatataacagaaagccaagcattaagtttagttgataatatttttgaatattatatagaaaatgcagaagcaggggaaaagttgggattctttattgatagaatcggaattgagaaatttaatcaagatgttttaaagggtatagatatgtagatttcttataaataatttgggattatataaatgccatttaaaaggtctttaaaaaaagatagaattttcattaaataaaaaattaattcacgggggaataatgaaaaaaataaaagcggtgttatttgacatggatggagttatattcgatacagagagagtatatttagagacttggaaaaagatttttaagaagtatggatataatatgactgatgatgtttatatttctgtaatgggaagaggacggaaaaacgtaatcaagaaatttttagagttatatggggaaaacttgcctataaaacaaatgtatgaagaaaaagataaggaattaaagaatgcagtagaaagtggtcaagttgctattaaagaaggggcgaaggaaattttagagtttctaaaagagagaggatatagaatagctcttgcgacatctgctaaaagagaacgagccaatattcagtttggaaatactgatatcaaagaagattttgatgtcatggtttatggtgatgatgtagtaaaatctaaaccagatccagaaatatttctaaaggctgctaaaaagctttgtgtaaatcctgaaaattgcattgttatagaggattcagctgcaggcattgaaggggctcataaagctaaaatgataggagtacatgtagaagatcttaagaaagccgacaatgatatactaaagtattgtcataaaagctttgagaatttactagatattaaggagtatttaagtaagaatattgataggtaataattaatatattcagaatttacgttaaattgtgtttttataaatatttattatcttactattttgataaaatgcggtacatagcttggagattattctaaaataatacttattttagacaacaaatttattattaataaatttgttgtctttttttataaaataatcatataatatttaataattttctataaatatatgttataatagactggcgatgcataaaattgagagcttcgtatttatctcgttattaacttaagggggaggataataagtttattattaaacgtgttaagaaagttttattaacttgaaaaattctcgaaatatggtgtatcatatatatggattttctttattaaaatagtgcgttaatagatacaatagattattatgcgacggttttgttaaaaataataaacaattatactaaataatatatattttatatgattagatttgaaaataaaaagaagacaaaatgttaaggagtgaatattatgggagataataaaaaatcttttatacaaagtgcattaggttcagttttttctgtttttagcgaagaggaattaaaagaactgtcaaacggcagaaaaattgctatatgtggaaaagttaacaatccagggataatagaagttccggaaggggctacacttaatgaaataatacaattatgtggtgggcttataaacaaaagtaactttaaagcagctcaaataggacttcctttcggtggttttttaacagaggacagcttagataaagaatttgattttggactattttatgaaaatattgcacgaacaattattgttttatcacaagaagactgtattattcaatttgaaaaattttatatagaatatttactagcaaaaattaaagatggatcttataagaactatgaagttgttaaagaggacataactgaaatgtttaatatattaaacagaataagtaaaggtgtgtctaatatgcgtgagatttatcttttgagaaatcttgcagtgacagtgaaaagtaagatgaaccaaaagcataatatcatggaagaaataatagacaaattctatgaagaaattgaagaacatatagaggaaaagaagtgttatacatcacaatgtaaccatttagtaaaattaacaattactaaaaaatgtattggatgcggagcttgtaaaagagcatgtcctgttgattgcataaatggagaattaaaaaagaaacatgaaatagattataatagatgtacacattgtggagcatgtgtctctgcatgtcctgttgatgcaataagtgcaggagataatactatgttatttcttagagatttagcaacacctaataaggttgtaattactcagatggcaccagcagttagagttgcgataggtgaagcttttggctttgaaccaggagagaatgttgaaaagaaaatagcagcaggtcttagaaaactaggagtagattatgtgtttgatacgagctggggagctgatttaacaataatggaagaagctgcagaacttcaagaaagacttgaaagacatctagctggggatgagagtgtaaaacttccaattcttacttcatgctgtccttcatggattaaatttatagagcagaattatggagatatgttagatgttccttcttcagctaaatctccaatggagatgtttgctatagtggctaaggaaatatgggcaaaagagaaggggctttcaagagatgaagttacttcagttgctattatgccatgtattgcaaagaagtatgaagcttcaagagcagaattttcagtagatatgaactatgatgttgattatgtaatcacaacaagagaacttattaaaatatttgaaaattcaggaataaacttaaaagaaattgaagatgaagaaatagatacagttatgggagaatacactggagctggaattatatttggtagaacaggtggagttatagaagcagctacaagaacagctcttgaaaagatgactggagaaagattcgataatatagaatttgaaggccttagaggttgggatggattcagagtttgcgaacttgaagctggagatataaaattaagaataggtgttgctcatggacttagggaagcagctaagatgttagataaaataagatcaggagaagaattcttccatgcaatagaaataatggcgtgtgtaggtggatgcatcggcggtggtggtcaacctaaaacaaagggaaataagcaggcagcattgcaaaaaagagcagaaggattgaataatatagatagatcaaagacacttagaagatcaaatgaaaatccagaagtacttgctatatatgaaaaatatttagatcatccattaagtaataaagctcatgagttacttcatacagtatatttcccaagagtaaaaaaagattagaacattaatttgagtgtgatttaaaattatagaaaaacctcgatgttaaatatcgaggtttttcttggaattatattaaaatatagaataatataatttttacagtttattatttggaagagtatttttataattttctttacatatgcaattgaaatttataaaatgaatgtatacgtgttttttcatatgattatgagtatatttaaatattctttatgtaatattaaattttattatatatttaataagtattttctattaatatattttgagggaaaatcggattcaattatatataatacatttatatttcgtataatgaaattatgcaagttatagcataaagaatagtgttcgtttatattatctttaaatattttaatttacttatttaagccaagtaatattaatactttatcacctaataaattgatcaagtaatgataatattattattattaaattttacttgaaattaataaaagatatcatatgattattatcaattgataaaggagtagatgttggctattaattttttagtagtaagataacataatttgaagtgattcaagaaatactacaattgttaaaataaggtgagtaatattaaaattaggttaagttttttaaaaagagtttaaaaatgttacaaaatagaatatacttgttactggattatgatatttaacaatatgtcgaatatttatattttatagggagatgtgataatatgtttaatttaaatccaaaagaagataaattctataaaatgtttatagaagctgcacaaaatgtagaggaaggtgcaaaagtattaagagaaagcctaaactcattatccaatattgaacttaatgttagcaagatcgaagaattagaacataacggtgatagattagtaaatgttatggttaaagaattaaatgattcatttataactccttttgatagagaagacatgtacttattgattaaaagattagatgacattttagatttaatcaactcaacaatacatagatttgtaatgtttaacgttactgaaagtacagaaccagcaaaatatttagctgatatgataataaaatctacaaaactcatatctgaattaatggatgaacttcatttaatagctggtaaaaataatataaatgaaaagatagtaacaataaaccaaatagaaagtgaagtagatcgtttatttagaaatacagtaggtgacttgtttagaaatgaaaaagatcctatagaaattataaaatggaaagaaatatatcaaatattagaaaacactattgataagtgtgaaaaaattgcaaatattgtagagggagttgtcattaagaatgtttagtactatgactataacagtattaatagtaattacagtattaatatttgactttatcaatggattccatgatacagcaacagcggtagctacttctattacaacaagagcgcttaagccgcaaacagctatagtaatatgtgcaatttttaatttcattggtgcattctcaggaacagcggttgcaaaaactgtaggagaaaacatagtaagtcataattctatgcctcaatgggttatattaggagttttaatttcagcaataatatggaacataataacatggtattttggtattccaagtagttcatctcatgcgttaataggtgcactagttggtggcggaatagcttataatttgaaatttgatgtagtaaattggtataatctttttcatgatgttgtaatatggatatttattgcaccaattattggttttacagtgggatacatattaatgatattattaaattggatattaaaaccatttaagcctggaataataaataaaatctttttgaaattacaagttgttgctggttcacttatggcattaaatcatggaagtaatgatgctcaaaagtctatgggattaataactatggcattattaagtggtggacttatcagtacatttgaagtgccaacatgggttatagcatgttgtgctatagctatggctcttggaacagcatctggaggaaaaaaaattatcaaaacaatgggaagcgggatggcaaaacttacaccagtaaatggatttgcggctcaaacaggaggcgcagctgtaatatttttagcaacactatttcacgccccagtaagtacaactcacattatttcaacaactgtaatgggagtaggagcttctaaaagaattaaatctgtaaaatggggagttgctcaaaatatagtttgggcttggattttaactattccaataacagcagctctttcagcatttattatatttatagctaagctatttatttaggtatttaagtaataagttcgagaaacttatgttaaacttatatatgcaatagatgatattttaagataataaacctatagatttcatataactgagatttataggtttatttttatattatatgaataatttattaatataaagataatcaatctaatgttatatggaggaagaatgaacagtttgacttatgaagagttgatacttctagataatctgatatatttaaaatgggatataaaagaaaacgaaaaacttataaatcttgtagataatttattaaaaagtgagaattttgactatcttatggaagccattggagattgtataataagaatggatacaaaagaatggataatgatattaaatcaaataaaagttaaaccaaatttaagtaatctaagaattaagaatataaatgattataataatggaatggaatatgcctgctttgtaaacgaggaggggaatgcaacagtaatttttaggggaacagctacaacaaaagaatggaatgacaatggtaaaggtgcttatgaatatgatacacttgaacaaatagaggccttaaaatatataaataaccttgaatatagtgatattacggtatcaggccattctaagggcgggaacaaggctcaatatgtatcaatattctctcctaaggtaagcaaatgtgtttctattgatggacagggattttcgaaagaatttatcagtagatatggagaagagattagtaaaaacaaggaaaaaattatatctataaatgcaaaatacgattatgtaaattgtttatttaatttgatatcagaaaagaatatatatataaaaactgaaatccagattaatccatttgattaccacaaggcaagtgtgcttttagacggaaatggcaatttaagagatgagacaaatgaagctgaattttcaaaaataattaattacttttcttctagcataatatcaaatttacccgataatttaagatatttagtgatagatggcattgtaaatgtaatagagctcatgttgtgcaggactgatggtaaggataatctatttaaatcattaggcgagtatttaataatgttttgccatgatggttgttctaactataaagaattttttagtataggatatgctgtatcagagatattgatcttaccattattgttttggaaggattttgttattgtagaggaaagcaattcaaaggaattgcttaataatgtagtagtaagaatgaagttattggaaagtatgtcgataaaaaaattacaaataatagataagagccaaatagatttaatacagagcatatcaagtgcagttgatgagctgatatataggattgagaatgagatttagaggtataaaaaatagtattgaaagaaatggagtaaataaatgattaaaaatttattgacattatcaggttttgctttaatctctgcattaatatatttagataataaaattataaaattatctaaatatgaaataaaaagtaataagattccaaaagaatttaataaatttaagataattcatttatcagattttcataactataattttatcggaaaagataatttccaggtgattaaaaaaattgatactgaagctccaaacattatcgttatgactggagacatggttaataaatatgataaagattttagcgttttttttaagctagcagaaactttgagtaaaagttataaaatatattatattataggtaaccatgaacagagattaaaaaaacacgatttagattttattacaaaaaggctgagtgaatttaatataactatactaaatgatgaaaaactcactattcaagaaaagggtagttgtcttaatatttatggcataaatatccctctttcattttataaaacaagaaataggccttcaaatatagaagaagtaattgggaaagtattaaagaggtgcgattccaaagaatataatatattattagctcataatccactatattttaaagaatatacaaaatttgacatagatttagttttatcaggacatgttcatggaggaatgattagattaccatttataggtggaatactttctccagaaagaaaatttttccctaagtataacagtggaatttatacaatagatacgaaaaagcttattgtaagtagaggaatgggacatagtaaacccggtataagattatttaatatgccagaaatattaagtataactttaagaaatgaatcctagaaatttaaagtttttttaaaataaacttagttattttactttgggagttaaaacctaacttggaaattccaagttatggaaagcccatggaagggagcgaattgagagagcatctaaaatatctcatagataatttttatgaaattgcaagacctgagcaaggaaaatttgtttaatttgattatttatacagtattggaagtatcatttatatactaattaatattacatataaaaaacataatatatttttataaggtgggaacaatataattacacccaaataaaattaattttttaatttaaggaggtaattatttatggtacatgataaagaacattcagcaaaagagggttctaataacaggagcataggtggatggattataagattggttttaacagttgtagttttaggcataacatctttcttaacacctggctttactattacaggaatgtggtcatttttaatagctgcggtggtaataagtgtaatagattatctagtagaggcgttcatgggtgttgatgcatcaccttttggaagaggtataaaaggatttttcatagcagcaataatattatatgtggctcaattttttgttccaactatggcagtatctatcattggagcaattttagctgctttagttattggaatattagatgcaatattgcccgggaaagtaatgtaagtatttaataagtaataatattttcacaatattagggatgattattttataatcatccctataattttgcatcttgttttttataaaacataaatatataattttatataatttagtgcttaaaaaggagaattttatggatataaatcatatacatcatattgcgataattgcgtctaattatgaagtatcaaaaaatttttatgtaaatatattaggatttgaaataatacgagaaaattataggaaagatagggattcatataaactggatttaaagataggaagtagtgaaattgaacttttctctatgccaaatgcgcctaagagaccatcatatccagaagcatgtggactgagacatttagcttttcatgtaaaagatattgaagaagtaataagagagctaaatgaaaaagggattgaaacagagccaattagaatagatgaatatacaaataggaaatttactttttttagtgatccagatggtctgcccttagaattacatgaataagcacatgaggcaataaaaattattaaggagggtatttttaatgaagtatgattttgaaacactagtatctcgaaataatgtaggtgcaagtaaatggaatttgatgagaaaaattaataatgatgttagtgaatctatagtgcctttttctgttgcagacatggaatttaaaaatccaccagaaattattgaagggcttaaagaatatatagactctagtattatgggatatacagaagctacagataagtattataaagcagtatgcaattggatggaaagaagacatacatggaatatagagaaagaatggattactgaattctcaggtgttgtgccagcactatatacaattgttagagcgcttactaaagaggaagataatgttttagtgatgactccagtatactatcctttttataaagcaattatagataataatagaaagataataaaaagtgaattaatacttaatgaagatcattatgaaataaattttgaagatttcgaagagaaggccaaattagaggataccaaattactaattttatgtaatccacataatccagtcggacgtgtttggagtgaagatgagttaaaaaatattggtagaatatgcagtgaaaataatgttattgtagtatctgatgaaattcattttgatctaataatgccagggtttaaacatacagtttttgcaaatatatctgaagaatttgcgaatgattcagttatttgtacagcaccaagtaagacttttaacttagcaggtcttcaagtttctaatattgttattaaaaataaaaaaataagagataaagtcaggtatgaacgtagaaagtctacaggaaatttaggtcttaatatttttggatataaagcatgtgaaattgcttataatgaatgcgagcaatggcttgaggaacttatacagactataaataagaatagaaaagttgtagaagacttttttaggagtaatattcctgaggtcaatataataaacctagaaggaacttatttgcaatggctagattttagaacattggagaaggatcataaggtattagaaaaatttatgacaacagaagcgatgtttttcttagatgaaggttatgtttttggcgatgagggtaaaggattcgagagaataaatttagcatgtccaacaaaggtgcttaaagaagcattggatagattattagaagctgtagaaaggtgctacagatagacatgctaaatatcatccttaagtaattatcttatttaaattcaataaaaatgaaactatatttatatgaacaattatttatagaaatatagttttaaagtaatatatgattaaatttatctatgtatatagaaaaatatgtttctatatacataggaacatatataaatatttataggaataatgcgggttaaataggataaaacttataatggtcttgaaaaagtattataagtcagactatcatagaaaaagtactggaaaactattattgacaaaaattatactataagatatcataagtgagagttcaaatttcatgattaacactttaaagttaatcatgaagtttatgtgagttaaagtaataatataatatataaaagcaatgaaaaagaggagtagaaatttttgagcattaaaaggaaactaactcaggagagtttaggagtacggttcttttagcaaggaaactcactcagacgagctgaggagtacagttctttagctaaatcatagatttagaaagaactagcaagaactaggaagagagagggaggcgctgaaaacccttatgcaagaaattttgaaggtagcttttgagcttctttagtgaaataatagtagctaaagacggtttgtctgaatcgttatttaaattaagagtccattaatgcagtaattctgtatatgtggaaataaaggtggtaccgcgagctttcgtccttttgtgatgagggctctatttgcgttgagaatcaaaattttatatttgcttcttggaactttcacagtctgtattttatattcgcttattcgaaagcccaaagagactgaatgtgagtcggatttaacttattaagacacagcaattgcagtgcatattctaaagaatatatattcttaggaataaatattctttacaatatttattgtttagaatataaaaagttaacaagttaacaagttaattgttagtttaactaagtttggaggaattaaaatgtcagaagaaataaaaaatatatcaactacatatgatccaaaagaatttgaagataggatctataaaaattgggaggagaagggatactttactccagtaatcgataagaataaaaaaccatatacaataatcatgccgccaccaaacataactgggcagcttcacttagggcatgcttttgatgatactcttcaagatatgcttattagatttaagagaatgcaaggatattgtacattatggttaccaggagaagaccatgcgtcaattgcgacagaagttaaagttgcaaatcagttagcagaacaaggttatgataaaaaagaaatgggaagagaagcattccttgaaaaagtttgggaatggagtgacaagtatagagctacaataagaaaccaagttaaaaagcttggggtatctgcagactttacaagagaagcatttacaatggatgaaaaccttagtgctgctgtaaaacatgtatttgttaagctttataatgaaggtttgatttatcaagggaatagaataactaactggtgtacacactgtcaaacagcattatcagatgcagaaattgaatatgaagaacaagcagggcatttttggcatatcaattacccattagctgatggaagcggggttattgaaatagcaacaactagacctgaaacattgcttggagatagtggtgtagctgtaaatcctaatgatgaaagatataaacaccttataggtaaaactgtaatacttcctctagttaatagagagattcctatagttggcgatgaatatgtagatttagaatttggaactggtgcagttaagatgactccagctcatgatcctaacgactttgaagttggtaaaagacataacttagaaatcataagagtaatggatgataagggaattatcaatgaaaaaggtggtaaatataaaggtctagatagatatgaagcaagaaaagctatagttaaggatttagaagaagcaggtctcttagttaagataaaagatcacgctcataatgttggaactcatgataggtgcggaactacggtagaacctataatctcaaaacaatggtatgttaagatggaaagtcttgcaaagccagcagtagaagtagttaagaatggcaaaactaaatttgttcctgaaagatttgataagatatacttcaactggatggaaaatatccaagactggtgtatttcaagacaattatggtggggacatagaattccagtatattattgtcaagattgcggagaaatgatggtacttgaagatgctccaaaggcatgtactaaatgcggaagctccaatattaaacaagataatgatgtacttgatacatggttctcttcagcattatggccattctcaacacttggctggccaaacaaaacagaagacttagaatacttctatccaacaagtacattagttacaggacatgatattatcttcttctgggttgcaagaatgatattctcaggacttcactgcatgggagaaactccatttaatacagttcttattcatggtttaattagagattctcaaggtagaaagatgagtaaatctttaggaaatggtgttgatccactagaagtaattgaaacttatggtgctgatgccttaagatttatgatagctactggtaatgctccaggaaatgatatgagatattatcctgaaagagttgaatcatcaagaaactttgcaaataagatttggaatgcttcaagatttgtaatgatgaaccttgataaagaagtaatgaacaaatataaagactgcaaagaatattctttagctgataagtggatattatcagaaatgaatactttaataaaagaagtaacagaaaacatggaaaaatatgaacttggaattgctatgcaaaaagtttatgactttatgtggactgaattctgtgattggtatatagaacttgttaaacctgtattctatggagaagatgagaaagctaagggaatagtttacaacgtattaaatacagttttaattacaggattaaaattattacacccagctatgccatttataacagaagaaatattcactcacttaagtgatgaggaaactataacaacttcagcttggcctgaatttgacgaagctttagtaaataaagaagcagaagatgatatggcatttgtaattgaagctataaaaggtttaagaaatgttagagctgaaatgaacgtaccaccttcaagaaaggcaaaagtaatctgctatatagctgaggatgctaaaaaagcatttaactcaggtgtagcatacattgaaaagttagcgtctgcatcagaagtagaatttattagtgataaggctaatgttcctgcaaatgctgtatctctagttgttaaaggcggagaattatttatgccgctacttgacttagtagacaaagataaggaattagacagattaaataaagaagcaaagaaactagaaggagaaattgatagaatagataaaaagctaggaaatcaaggttttgttgctaaagcaccagcagcagttgttgacgctgaaaaagaaaagagagttaagtatgttgaaatgttagaagctgttaaagttagaattgaagctttaaaataattttaatgaaattcagtaaaaaagatattgctaagttccttggaacttagcaatatctttttattttttttaggtgttcatattacgctgaaagataaggaggctattagagcatataacccaatatgcattgaattattaacctcacaataattttaattatcatatagttagtaagataaaaaagttaaaaatttttgcaaggtaaggatataataggaggattattaatatatataattctagaataatatatatggaggcgtttgaattttgaaaacgagaaggcatttacttaacttaattttttggatatccttatcaatcttatttaatattattatatattacacacgaggtgaaacatcagcaatagaatactttggtggttacatagtagaaatgtcgttaagtttagataatttatttttatttctgatgatattttcaagttttagaatacaggaagaataccaggaaaggatacttctatatggcgttataggggcgatggtattaaggttaattttcattttacttggcgtagctatggtaaataaatttagttttatattatctatctttggagtattattgctacttagtggtgcaaaaatatttcttagggaagatgataatattcaatttcatgataatttggcagttaagattttaagaaggataatgcctataacaaatgttttgcatggaaataaattttttgttaggcagaataagattatttatgctacacctctttttatagtacttttaataatagaattttcagatattatttttgcaatagattcaattccagctattttttcgataacaacggatactttcatagtttatacctctaatatttttgcgattttaggacttagaagtatgtactatatattagaaaagatgaataatatgttcaagttcatgaaatatggagttggatgtatattaatttttacgggaataaagttagtaatattgttttgggaaattgaaatttcagttacaaattctgtgttgattatattgtctattttattagctagtatattaatatctctattattaagtgaatttgataagtttagaaattggtgtaaaagaagattatagatattatgaaaagggcgcaaaggcacaatacgaaacttaaccacagtcaccttcgatttttttcttgaagaattatagaataaatttagttcagggatgtttttgtttagcatttaattagtcatttcactagaattaagatataatgtaaagtaaatacatactatttagaatttgcatttatagaaaaacataaaagacaaagaggtaagaaaaatgagcatgacttataaagacgcaatggattatattacaagcgtggggaagtttgggtctaattatggacttgaaagaacttttagaattttagagttacttggaaatccacatgaaaaacttaaacttatccatattgcagggactaatggcaagggatcaactacagctatgacatcaaaaatattgattggaatgggatataaagtcggaatgtatacatccccatatttagaagaatttgaagaaagaattcaaataaatggaagtaatattagcaaaaaatcattagtagacttagtagaagaaattaaattagtagttaataaagtaattgaagaaggatatgaacatcctactgagtttgaaatcataactgcattaatgtttttgcatttctatagagaaaaaatagattatggagtaattgaagttggtcttggtggaagattagattctaccaatgtattaacgcctaaggttagtgtaataacatcagtaagtttagatcatataaatatattgggtgataatttaaaagatatcgcaaaagaaaaggccggaattataaaagaaaatataccggttgtactctatcctcaaaaaaaagaggcagaagaagtaatattaaagatagcggaagaaaaaaaatcaaaagtatattttgtgaatgaacaaaatggaaaattggttgatatcaattatgatgatttttatcaaaatgtagttgttaaaagtattaaaaatatatataagattaaatttcctttgcttggagaacatcaaatattaaatttgggagttgctttaagtgcaatagaggtattatgcgagaatgaaaaaatagaattaaatacaagcttaattgagaaagctttacaggaagttgtatggataggaagactcgaggtcttaaaaaagaaacctacgatagtaattgatggggcacacaatatagatggaattaaagctcttagaaaaaatatagaaaagtattttaaatataataaattatacttattgcttggtattttagcagataagcaagtaaaagaaatggtacaggaaataacaccattagctgaaaaagtttatgcacttacaccacatagtgaaagagctgaacttagtgaaaatttgaaagaggaaatattaaactataattcaaatactattgcattagaaagttatgaagaggctttttctctagcgttaaaagaagctaaggaagaggatttaattgtagttagtggatcattatacatgattggagatatgagaaaaattataagaaataaatttcctaataagtagaattggggcacatatattttccgaattagtctaaaagaatataaatcaaaagattccgaggcaagcttcggaattttgattaaaaggagtagtgaaagttatatggttaagatagaaatagaaaattacatcaataataagaactcaatctattatgatttaaaagaatttcgtgatagaaatccagatacactatatagctatcaagactttgaagtggctggaagaagggaatttaagattattacgaacaaagttcgtaaacttcaggattatgaaaagaataggctagctagtgagctagtaggacatttatgtaattatgctttggatgaagaaaaattatcaagtgtccatgattatattacgttaaatccaatcatcggttattatgaaaacttgattaaaatcttcaaagactcgatggagaataataaagagatgttacaagcaatgagcaagagagtaaataatttacttaaagagagttcgtattcagaagcggtgaaattagggatattactttcgcctatatgcagcattaaaaacttgaaggatatattaaatgtgttttctattcataatgaatatattttctatacaatcaagtcatatgaatatattggaagttgtaataatataatttttgagatttcaaaaagatctaaaggatatgggaagatattttgtataatgaatcttactcctacaacttatgagataaaaaaatggatgattgaaaaaggttgtgataatagtgttggcattacggaattattatcttacactatgctttcattagatcttctgagctatttggaggatacaaaattttcaaaagaagagattgaagtttttgcaaaatctttcagtacattgctttcagactatagtttggatgatattaagtattcaacaaaagtttgcaataagttattagaaattattgataatataagtggtggcatatattcgttatatgctgtaatttcaatattatattcaatagaagctattattattgatgaatataagaataaaggaaattcaaattcgtataagttaaataatgattataaagaaatagtagataattgtaaaaaaatttgcaagaaagagttgtggcataatgtaattgcgaatgaagttcacaatatagaaattgaaagtagtgtattaataagttgtgcagatagaacgaagtatagattaaagaaaagtgaatttgaattaattataaaaagagattatacaaatgcacttttatataaatatgcattttccattggaaataaggctataaaaaaatgtgcttttaaattagggttggaaaaattaccaatgactgaaatattaagcggacaggatgaattaaaaatagaaaatttactttatgaggatatagcacaaatttgtttctttataattataaaatatgcacaatatgaagattttatagatgaatataaggatattaactttcaggcgctaaaatcacctttaattgagactagaattcaagcggctgcaaatcttcaaagatttaaagacgagtttgattcattggataaagaaactattaaggacgctattagcacagagattgttagtgatgtacgaagagcattaaattcacttttgattaaatcaagtagcaaaaagaataaaaaatatgttcaaatagatgagaatatgcatattgatgctcatgttaaagatatatatttaaccagtgtaaatattgctggaacaagctactttgatatgagtgaaatatacaataaattattggaagaggatattgtatatttaaaaagagattctgataatgaatatgataaaaatgcaattgaagttataacaacagaaggatttgtaatggggtatgttccaaaagacaataatttaatattaaagaatttaatagataaaggtaaatatctttatggaaaagtagaagagataagtgaagattatagtgttataaaaattcaaatatatctaagttataaagatgtaattgaggaaataacaaatactttatcattactatctggggagagagaagactatttgcaataaaaatagtacggattgaagttcaataaaacataaaaaccatgcataagaaagaagagtttcttatgcatggtttttatgttagcaaaattgaataaattattgctagaaatttataatctatttttagtttatagaattttctttcttccaagctaatagtgcttttgatagctgatcaggacaagatgttcctttatttctgcaatctattccacctaatctttttattatatcatccacaggcatacctttaactaattgaccaatgcctaataagtttccagcacatcctccaacgaattctacatttttaagaatattattctcaatttcaagatttattgtagatgaacaaacaccagttgttttatatgaaaacattccacacactccttaagataaaatataaccatatacatgaaaagtaagcagctataaagaattttccaaaattacttactttgaaaatgtaattagttaagctcactttattatacaagaaatttgtcaataaataaagataatgaagttaataagttgtaccaataatatatattcagaatatattatagatagtagaatgattatcttaaaaggggggaatggagtgagttatattgttttatgcaatactggttcagatagtttgaataaaataaacactgagaatctaaatactcaaaatatagttttatctattggtgaaggtccatttggccctcatggattatcattatataaaaataagctattagttgcaaataactataataatagcatatcgttgatagattttaatagttttaaagaagaaagcaatatatatgtaggagcgcatccaaatgatatagtggcttataatgatattgcttatgtttcgtgcggagaatctgactctttaataatatacgatttgctaaatgataggattaatttcgaaataccaacaggaagatttcctcataatatcacattattaaaagatagaaatttagtttttataagtaatatgggagatgacagtatatctataattgactatataaataataaggagataaaacgaattaaagtagaaaatactcctgcaaagataagcgtatcacaaaataaaaaatatttatacgtatgtatgagttatcttgggcgtgataaaaatggtagtgttggaataatagatttaaatactcttgaattaataaataaaattcaagttggacactcgccagtagatttatttgaagaagacagcttcctatatgtttctaatttatgtgatggttctataagtattgtaaatttaaatgaacttaaagaagaggaaaaaattgatattggcggaatgcctagaggaatagtgaaatctagagataacatatttgttggagattttttgaatggagtactgaagataatagatatgaaaaataggagaataaaaaccataccaataggaaatgaacccaatggtatgactttaacttagacatatgaaagaaaataacaagtccaaaataccatgattattttttatcaggcaaggaagtagaatggacccatagcctgatattagggcattccgctgataaacagagaacccaaatctatgatttggtgtgaatcgcttactcagtgagcgcatgcgagtcaaacttccaattgtggaaaataggcgtggccgatggaaatattatttttttgattatgtcttaaatcgataaaagtaactttaattaattaataaacttattatattggtataaatttcggaaggattttctttccatttagcacaaattgaagtagcttgatttttggatggaactgataattttaattccattaataacgagtcgttttctacagctttaaggttaacaataaaactatcgtttgcacctaatgtgtaatcagaatgtatagttaattccttttttatagactctattttttcttttatatagtcattaatagtagacatttttgaaggggatattctatctttaaataaagagagaacattatctcctttttctgttaatatcaataattttttatcatttacatcatgatattcaacgaatttagattcctcaagctctgataaatattgctggaatgtaaaataattaataaagttattttcaagaattatttcagtaagctgagtatttgatataggattttttattgattttaaaacatataacattaataacttattttctgctaattctgatgaactttcgtacataattacctccataattgatgaaaatctccttttattataacacaaatttttttttagtgaataggagtatatcataatttataagtttaagtttacttaatagcataaaaaaatatgtaatgcatatagtttaaatataaaatataaagttaaaaggagcatggaaagtgacgtggaagaaaaagagaatcggtattgacatatttttgattatctttttagtatttatatctatagggattagcaaagcgatacaggcaatgggtaacattcaggaagaagatcctatatattgtgttgatactaatgaaaaagttattagtttaacatttgatataaattgggcagaaaaagataatttgaatgtaatattagacatattggacaaatataatgtaaaaggaacattcttcataatggggggatgggtaaattacagcgaggacaatgtggagaagcttaaggcaataaaggagagggggcatgaaataggtaatcatagctacaaacatcctatgttcactaaaataggagcagatagaatgaaagaggagatagaaaagactaatgatacaattgaaaaatatacaggtgaaagacctaagctatttaggtttccaagtggagattataataaagaggctttttcaaaagtaagaaacctaggatatgtaccaattcaatggagtgttgattctgtagattggaaagagatatctgaagaaactgaatataacagagttatgaaaaacgttaaaccaggatctatacttctttttcataataatgcaaagtatactccaaataatttagatagaattattaaagaactaaaggataaaggatatgagtttaaatcagtaggtcaaatgatatattcagataactatagcgtagacaatcaagggattcaacataaaaataattaatatttattgaaaataaactagtttttgtattataatggtaatatatgctagtgggagcatatattacacaaaataaaataatttccgatggagagagggattacaatggataatttgatgttaaataacaaaatttaccttgaaggcaaggtaacatctggattagagtttagtcatgaaatgtatggggagggtttctacacttttgatttagatgtaatgagattaagtgattcagtagataaattaaatattactgtttcagaaagattactaagtgacataaagcttgatgagggtgtggaaataattgttgaaggtcaacttagatcttataacaagtttattgatggatctaacaagctaatacttactgtttttgcaagaaacattgaaccatgtctagaaagaagtaaaaatcccaatgaaatatttttagatggatacatttgtaaggagcctatttatagaactacaccatttggacgtgagattgcagatgtattacttgccgtaaatagagcatacaataaatcagattatattccaactattgcctggggaaggaactcaagattctgtcaaactttaaatgttggagataatattaaggtatggggaagacttcaaagcagagaatatcaaaaaaaggtatctgatagtgaagttgtgaaaaagattgcatatgaggtatcaatctcaaaaatggaaagagctaataaggaagagagcactggagaagagggcgcagtatagaattgtttatttaattaaaataaatattctaaattcgaaaaagctataagcattatgtaacataaatatagtattttttttggtaaataaaaaggtttcaattaatatagatttattgaaaccttttatttaattatgagaaataaccagtatattaactttatacatctgataggtactttctcaataatatattatgtaattttgaatttctaataaaaaataattactttcttaagtcatctaatatttgagttttatcttttgtcttgtcatctactgccttgattatcttagcaggagaaccagctacaacaacgttgtctggaacatcttctgtaacaacagaaccagcagctacaacgctacctgcacctatcttaacgccttcaaggattacagaattagcaccaattaaggcattatcgccaatcatacatggttctttgcttggtggttctaatactccagcaacaacagcaccagcacctagatgaacattcttacctaattgcccacgagcaccaactacagcattcatgtcaaccatagttccatctccgatttcagcaccaatgtttattactgcacccatcattattactgcatttttaccaatagtaaccttatctctgatgatagcacctggctcaattctagcgtcaacttcaagtaaatctagcattggaatagcagaatttcttctatcattttctattctaaagtgttttataagatgtttattatctaaaactattttagttatagaatcagattctcccattagtatataaaatccgttagaaccgtaccactctacatcattcatttcagcattgcttaaatctccattaacatagacttttactggagtagatttttttgattccttaataaatctagcaatttcataaggatccgttaaattatatgacattatatcaccctttccattattttcgcaatcatccttattataataaagattgaacgcaattaaaaggggaataagtaaaaaaacacaaatagtttgaatcaattttattaatgaggtaaaataagtttatattgcaaaacgggggcgcataaattatgaataaacaagtagagaaaatacaaatctcgggaataagaagatttgccgagaaagttaagaaagttgaaggagcaatatcactaaccatcggacagccagattttcctgtgccaatagatatatctgaggctatgattcaggctataagagataataaaacagtttatacatcaaatgcaggtgttgacgaacttagagaagaaatttgtaattacttaagaacatttgatattgaatataataaagatgaaatatgcataacagttggtggaagtgaaggattatattcagtattatttgctgttatgaattcaggagataaaatattaatacctggacctgcttatccagcttatgaaaatatttctataatgataggggcagatgtagtaacatatcctctaaatgaagatttcacattagacatagataaaattaaagaaaaattagatagtgaaaatattaaagtattaatgttgtcatttccatcaaatcctacaggtgcaattttatctaacgagcaaagaaatgaacttgttcaattaataaaagataaagatatcatagtaataacagatgaaatgtactcatctataattttcgatgattattattcaatagcgcaagcaaaagaaataaaagataaagttatatatgtaagtgggttctctaaaatattttctatgacagggcttagaataggttatgttgcatgctgtgaacagtacatgaaagaaataatgaaagtacatcaatatggtgtttcgtgtgcaccttctattgcacaatatggagttcttgaagggctaaaaaaatctttaaatgatgtagaaaatatgagaaagacctttgaaagaagaaaagactactgtttgaatagattaagggatcttaatttggaagttgcagaacctaagggagcattttatatatttccttcaattaaaaagttcaatatgtcttctgaagagttctgtgaaaagttattaaatgaaggaaagcttgcttgcgtaccaggtacagcctttggtgatttaggggaaggatatatgagaatttcatattgctatagtgatgaaattttaaaagaggcatttgatagatttgaaagatttttaaaatcaaatttcacaaattgctaattaaaaattttagaaacaataagataagctattatttaatgaactctttaatataaataataaataaaaatagggggcataacaatgagcgaatttaaaaatgttacagcagtaaaaaaagcaaatgtatatttcgatggaaatgtaactagcagaaccatcatatttgaagatggtgaaagaaaaactttggggataatgttacctggagattacgaatttggaactggagataaagaggcaatggagatcctaggaggttcaatggatgtaaaattaccaggttcagataaatttgttacatacaaagaaggagatacttttatggtacctgcaaattctaaattcagtctaatagtaaaagaagtggcagattactgttgttcttatattaaagaatagttaaggtattaaaaatacttataaagatagagatatgaaagcatctgtttttacaggtgcttttttcttcatggtgttccgagcatgggaactcgctaaacaaagtaaaactcaataactatccgaaatagcttaagtaaatttagcaggtgattcattataactgctcttcattgtgttacgttgacacaatgtttacttttttgttagtattgtataatcaaaacagaagattaaacattaagatagagtacaaaacatcacaatacaatatcttcaagcaaggattattataaaaggtgaatatatgaaaaagataatgaatgaacaattaatttatgaagtactttcagttgtagaagaaatccctgaagggaaagtagctacatatggacaaattgccagtcttattggtagagacaaaaatgcacggcttatcgggagggttcttagccaggcagaagcttatggacaatatccatgccatcgtgtggtaaatcatgctggaagattggtaccagggtgggaggaacaacgatttctgctattagaagaaggagtatcctttaaagatagtaatcatgttgatatgaagaaaaataagtgggaatgttaggatagatatgtaagattaatgagcagaattatttgaattcgattgatcgcctttaatagagcagttaatgatacaagtagatgataatattataaatgcttatatcactaaaaataagtaatataagcatttataatatgtttcaatggaatttagatggttattattcttagaataatccatctaaattcttagaaacaagaatacagttatttattatggttagtaactaatttattgaattcctataacatcactcatgtcatataatcctggattagttacagaagccatatactcacatgcttttaaggcaccaacggcaaaaacttctcttgaaattgctttatgagttaattctattacttcaccagttccggcaaagataacatcgtggtctccaattataccaccacctctaactgcatgtataccaatttcattttcttctcttttggaatttccttctcttccatagatgtactttgttgtatcttctatagagtcttttatggaatcagcaagcataattgcagttccacttggagcatccaccttttgattatgatgcttttcaactatttcaatatcatagtttccatagagtagaggagttactttctttaaaagagaattaattaaattaataccaaaagacatgttacctgatctaaatagcttaagagtagtactcttttcatctattaaagataaatcttctggtgtaaagccagttgaacatattactaatggtttgttagttttttctgttatttctaatagactatgaagagcatcagctcttgaaaaatctaataaaacatcatattggatgtttaaatcctcagtgctttcaaagataggatatggagcattacttggaaatttatcaattccagcaacaatctctaagttcttaaatttatcagcgcactctgtaatcatcttacccatcttacctgagcaaccatttaatactatttttatcatattatcaccttatatcaatttataatctagcaaagcagcttttagtatttcctcattgttattatccatttcacaaagtggaagccttaaaggaccaacatcgaggcccataagattcatggctgttttaactgggattggattcgtttctaaaaataaagtattagctaaagataatgtgtctaattgaatatctaaagcttccttaaatttattagctaaacatttttcagctatttcatgaactttacttggaattatattagctaaaactgaaattacgcctatacctccaatagacattatagatacaatttgatcatcattaccagaataaatatctatagaatctctgcaaagcgccttcatttgaagtatttggctgatatttccgctagcttcttttatcgcaacaacattgcttaattcagcaagcttagctaaagttttaggtgcaatattaacacctgtcctactcggtacgttataaagtacaataggagtattaacctcatcatttatagctttaaaatgttttatcaaaccattttgagtagttttattgtaatatggtgtaataacaagaagtccatctactccaacgctttcagcatatttactcattgaaatagcagcagcagtattgtttgaaccggttcctgcaattacaggaattcttttgtttattacatcaactgtaaatttaattgcatcttttttctctttttctgtcatcgtagtagcttcacctgtagtaccacaaattacaatggcatcagtaccttctttaacgtgccattctaataaatttttaagtgattcgaagtttattccattttcattaaatggcgtaactatagctacagctgagccttgaaatattgacattcagattcctccaacttaattactaagaactatttattatcttttatcattatttcagcaatttgaatagcattaagtgctgcaccttttcttatgttatcaccaacaacccataggtttaaaccattatccacactaaaatctcttctgattcttccaacataaacgtcgtcttttcctgaaacttcaagagcagttggatattttaattcgtctactttatcatatacagttacaccttgagtgtttccaaataattcgaaaatatcttttatatcaaattcagaattaagttcaacattgatgctttcactatgcccattaagtactggaactctagctgtagtagcagttactcttaaatctggttcatgaagaatttttctagtttctttaatcatcttttcttcttctttagtgtaaccatcttctaaaaatacatctatatgaggtaaaacattaccagcaataggataagggaacttcttaggtgcaacacccttaacaccatcttctaaatctcttataccttggacaccagccccagatactgcttggtatgttgaataaactattctcttaattccatatttgtcatgtaaagctttcattataggcattgcttggattgttgaacaatttggatttgcaattattcctttatgaagtttgatatcttctggattaacttctggtactacaagtggcacctcagggtccattctccatgcactgctattgtcaattactactgccccatattgcgcaaaaataggtgcaaattctgtactagcatctccgccagctgaaaatagtgcataatctatttttttatcttttatattcttttcacaagtttcttcaactacataatcctttcctctaaatgatagagtacttccttcagatctctttgatgcaaaaagatataaattatttactggaaagtttctttcttctaagatttctaaaaattttctacctacatttccagtagccccaactattgcaatattatacacaataatccctcctaaatttatttattaatatttttatacatacaattactatagttaaatattgaataaatatcaagtcaatgagcaaaataagttaaaaaaaactattcataaagaattatttattccattaattaggggagtaatgaaataatgtgtatatttatgcatatatatgcaagaagttgaaataattattagcagctattatgtcgtataaatcttacaaaatattataaattaaatgtaatttttgtaaaaatatatttttatagaatagtaaagtgatagaaggaaataatattggatgaaaagataaactttacaatttatttttatagtgtaattcaagtaacttagaatttttttatttcttttattcttttcataaataaagaaatatcaataaaaaactaattattaagattggtagggataaagaatgggtaataaatctgtaaaaaagacaataaaagcaaaacttaaagcaaataaagagcttactgaagctgaaaaaatgagagaaaaagttaaatatgaaattgcagaagaacttggtttaatcgataaagttaataaagaaggatggggcggactatcttctggagagaccggaagaataggcggaataatggctaaaagaaaaaaagtgccaaagtaaatgacaagcttctatatttttactaatttgactaagtaaataattacgatataatatactagatgaattagtaaatttacgttaagggcgtgataaagcagatggcttataaagagtttgccaatatatatgatgaattaatatatgaagatattaattatgataaagttgcagataagattataaatatatgtagagaaaataatttgaagtttgaagattatttggatttagcatgtggaactggaaatgtttcgattaatgtagcaaaatactttaaaactgtttatgcagtagatttgtcggatgatatgttaaatgtagcttttgataaatttaaaaagaataaaattaaagcaaaagtaatttgtcaagatatgtgtgagttaagtttaaataaaagatttgatcttataacttctgttcttgactcaactaattatataactgaggatgaagatttgcttgattatttctcaagtgtatatgaacatttaaaagaaaatggtatatttatttttgatataaattcgtattataaactttctaccgttctcggaaataatatatacacttacagttctgaagaaattttttatacatgggaaaattcatttgaagatgatgtattaaatatgtttttaacattcttcgtaaaaaccgaaaatgaactatataaaaaatttgaagaagagcattttgagagagcttataaagaaagctatatagaagatatattaaaaaaatgtaactttagaataataaataaattttcaggatattctgatgaggaagtaaatgaaaatagtgaaagaatactttacatagtaagtaaataagacgtgaaataggagatgagataaaaatgaaagataaaatagttagagcaacagctaaggatggaatggttagaataatagcagggattactactaatttagtaaatgagggctgtaaaatacatgaatgtacgcctgtagcttcagcagctttaggaagaatgttaactgcaggtacacttataggaactacactaaaaagtgaaaaagaagttgtaactttaaaaataaatggtaatggggaaataaatggaataacagtaactgcacatagcgatgcatctgttaaagggtttattggaaatccatatgttgataggcctcttaatgaaaaaggaaaattagatgttggaggagctattggaacagatggtattttatatgtaataaaggatttagggcttagagatccatatattggacaagtgcctatacaaactggagaaatagcagaagattttgcatattatttcacagcatctgagcaaacaccatcagcggtatcacttggtgtattggttgatagagatttatctataaaggcggcaggtggatttatagtgcaaatgatgcctggcgcagatgaacttcttgcagatgttataacatatagattagaagaaattccaccaataactacattaataagtgaaggaaaaacaatagaagaaattttagagtatatttttgatggaatggatttaaaagtattagattctttaactccagaatataaatgtgattgttctagagaaagagttgaaaaagccttaatatctattggaaaggaaacgcttcaagagatatatgatgacaaaaagaatgaggaaatagtatgcaacttttgcaatactaaatatgaatttactaatgatgaaataggagaattattaaataatagtagataaacatactaaaattatagaataaaaataataagaagatacagagaataatttggaagactatgaaaaatcagattattctcttttttcgtgcataaatattataacagaatattttttattttaatgaaggagtgcatggtatgaaaaaaaatttggatattatctttggtataattattatagtatatattgcagtaataaatattataagcagctctaaaatctcatttagtattcctatttttattttaggagttactttaataatatatcattttattaagaggagaatagaaagtaataagtttatatataggtattttagagttttaaaagtactaatttgtatagggggtatattttttttaggaatagaaatttttataattaattatcctaaatataataagggtaatgcagattatattattgttttaggagcaggacttgatactaactctaacccaagtttaatccttcaaggaagattggatgcagctttagaatacatacaagaagatgattatagattcattgttttatcaggaggacaaggatcggacgagaagctgccagaatcacatgcaatgaaaaaatatttattaaatagaggagttgatgaggaaaaagtaataattgaagataattcaaggaatacagatgagaatcttaaattttcaaaagcaaaaatagaagaaaatagtggaaaatctctagataaacttaatattaaaatagtaacaagcgattttcatgctcttagaagcagtatcttagcaaagagaaacggatatgtaaattatagcaattattctagtcgcactgtatggtatttaattcctataacatatacaagagaagcttttgctattgttaaaagtatgatatttgattaatattaatatacaattgaattttattagcttgaaaggatagcgtaaacaatgaggataaataaattatttagtaactatggaatttgttctcgaaaggaaacaaatagattgattgaagaaaagagaattattataaatggaagatattgtgttgagggacaatgggtaaatgattcagacgaaataatatttgacggcaaaccaatttctacagtggaaaaagtatacattgtcttgaataaaccagttggaattacttgtactgcagagaataaagttagtgataatataatttcctatatgaaatatccacactacatatttccagttggcagattagataaagactcgcaagggcttattttaatgactaatgatggtgaagttgctaataggattttagaaagtgataatatgcatgaaaaagaatatttagttcaagtaaataaaaactttgatgatgaatttttaaagaggatgtctaatggagttgagattacagggaataaaagttctggtgttagaaggataagtgataaattaggtttatataagaaaatagaagataaagaaattctactaggggaagaagatccaggtgactcgtccatagtacagttaaaagaattgaaaaacatagaacgcgaacaaaataaatttgttaaaacaagaccatgtcaagtagaaagggtagatgataatacatttaaaattatactaactcagggaatgaacaaacaaatccgtaagatgagcggagctttaggttataaggttattaaacttgaaagaattagaataatgaatataaagcttaatgatctggaaacaggaaaatggaggtacttggaagaaaatgaaatgaaaagccttaaaaatgagttgtttaggtaaaacatattttagtcaacatcaattttgggttaagattgataagtatataagtaaactttattgaaaaggatatatgcctatgagataattaaattaaatatagtagagttatagttaaaattataagtaaattctataatataggaatatttaacctttttattatataaaacactatagttttgaagaaatattttaattcacatggagagatagtatgaaaaaagaattgataaaagcaattgaagcagcagaaaggtataatttatttttaaaggtagtgacatcagttagaagctacgattcatataacagcttttttaacatttacgatgagcatgaagaggcatgcagaagaatagttgtacttactaagacaaaggaattggaagaagtttatgatgaagatccaacggaagaaataaaagaatgcaaaatagttcaaggtaatttatggataaaggattattcccttttgacgaatccagataaaataaatttatcaagtttatatgttattaagaatttggttgaggaactattatgaaaataaagaaacgtctaaccatttcaaatatattcatgttaattatacctgtaattatcatatttattattgcgtttataatgaatattccattttcaaaggcctatgaaaatagatttgaaggttatagggagcatgatcagtatgcttatttcattcaacaaagtttaaaaccagatatgaaaaatatagaaaataaaaatgatttagataaatttccagagcaattacagaaatttcttgatcctaagggatatcacctaataataacatatgatggggaaattgtatcatcaaatattgaagataaggataaagaagctatttcaatgataggggatgatgtactttttaaatctaattcattagttttagagatgaactccatatccttagttaaaaatagctttgttaaggataataaagtagtaaatattattgcaataaatccatcatataaacctgtaaggattgacataaaaaatgaaatgtcaactttggtaataagttatataataatagttattataatttcactaattgttgttacgataactaatgttatactatcaagtaagatttataagaaattaattcgtcctttagaacttttaagctatggagctgaacagataaaaaacggaaatctggactttgaaatgaattatgaaagtgatgatgaatttggacaagtttgtggcgattttgatgaaatgagattaagattaaaacattcggtcgatatgcagctaaaatatgaagaagatagaaagcaactagtggtaggaatatcccatgatttaagaacaccattaactgcaattaaaggttatgtggaagggttacgtgatggggtagcaaatactcctgaaaaacaaaaaaagtatctagacacaatttatactaaggcgtgtgatatggatgtattagttgatagtctgttccttttttctaaattagatacaggcagatttccatttaaatttgatgtagtaagcattaaggaatatatagagagattttacaggtgtgctaagaaagagttttatggaaaaaacgttgaaatttcatttgaaagtaaatgtgagaattcaacattagtgaaactcgattataatgaaataaatagagttcttctgaatatattggataatagtgttaaatataagcagaagaatgaagttaaaataaaaattaaattgtatgaagatgaagaatttgtaatattagaaattagtgataatggttcaggagttaccgatgaagatctctccaagttatttctaagtttttatagaggtgacgtttcacgcacaaagcctaatgaaggaagtggacttggattagcaatagcaaaacatataatagaagcgcatgatggagagattaaagcttttaataatgatggacttacaataagaataacattacctaaaagataattgtaaaactgagatatattataaggtagggaggatagtcaatgaaaaagatattgataatagaagatgatgaaagtatagctgaattagagagagattatctagagataactggatttaaaacagaaatcgctcaagatggatataaaggactagatcttgcgctaaatgaagaatttgatttgatccttttagatgttatgctgccgggaaaggacggatttaaagtttgtcaggagatacgagctgttaaagaaatccccattttgatggtaactgctaaaaaagaagatatctataaaatacaaggacttggaattggggcagatgactatattgtaaagccatttagtccaagcgagcttgtagcaagagtaaatgcacatatttctaggtatgaacgtctcacaactattgaaaaaaatagcgataatgaaaaaagttcaataattattgggcgtattaaaattttacttaaagcaagaagagtttatataggagaaaatgaagttaaatttgcaaataaagaatttgaacttttaatgtttttggcttcaaaccctaatatcgtattttcaaaagatacattgctagacaggatatggggagaagaatctttaggagatagttctactataactgtacatattaatagaataagggagaaaattgagttagatagcagcaatcctgagtatattgaaaccgtgtggggagctggatatagatttaacttataagttaatgattattgatactgaataaaaatatgtttattttaataaaggtttgaatttatactataaattttaaaaatcatgggaaaataacacgattatgaaatgttggctagaggtgcaagtaacttttgtaaggaaatgcaaaagttacttgcacctctagctttaatttataatattaaatttaacatgaatttaacatttgtttatattctgtttatatatgtgtaatagagatgttacaatactttattataattagaaaatgaatttagagtagaaatagtattactaaatgacaaattgaggaggaaacaagattgagaagaatatttgtaagttttttaattggaactttagtggcttctagtagtatatcaatgattaatataccaagtgcatatgctgatactactgataatagtacaattaacgaagtgtctgatagcgggacgattaaagtatcgttagaaaacataagagatatcataactgaaaataatttagatattaagattaagcagaataatttaaaaatagcacaagaggaatatcatgatgcattagatgattatgatagtgcaaagagtgcatatgatgcttatagtgataaggagaatatcgagtcgaactatgaatcggcaaaaaatgcctatgaaaattgtacagatgacactcaaaaagaaactcttaaagtagcttatgataatgccaaagcagcttatgatgcgaaaaatgcttatgataatgctgatacaactttaacgacaaagcgagatgcttttaaaacagctagggatgattataacaaggaaattgaagatcaagtttacgcagctcaacaggcatacataacttatttgtctgatttaccaaatgaaaaaataaaagaagatacagtgaatattaatactaagaaagaacaaatatataaacttcaatatgatagtggctttatatctaaaaataaatatactgaattattacaaggaaatacttcagttgacgacttggactcgtcaaagaatacagcagatcttgataaacttaagctattcaacttacttggaataagttctgggagtaaagttacatttgaaaatgatatagataaaaattttgatgttatatctaaaattaattatgaagatgatttgagcaaaatgcttgaaaataatattgatataaaacttcaaaatgatgagattgatgatttagatgatgctgaagatgattatgataataaagacatttatgataataaagttgaggaagcaaataacaaattaaagtcgctaatgaatagtactgagacaagctttaaaaaacaatataatgatttaatgacttcttacaattcaataaaaagcagttatgatgtaataaaccagaaacaaaaagaatatgaaattgagcaaacaaaatatgattatggatttgtttcaaaaaatgatgtagatgctgcgaaattgactttagataatgataacgcggattttataaataaaagaaatcaatgctatctatcttatttaaagtacattgaaatgaaagagggttactaaaattgaagcttttatttaataaaaaaactttggctaataaagaaattatagaaacaactgaagcaagcaagaaaaaattttttactaaaaagaaagttataagtttagtagctgtattacttgttgtatcaataggaggcggtatttataaggtgaaatttgctaagacaaaaacaacacaaagcagtgttaagtatacaactcttaagaaaaccaatattgctacaacaattagttcatcaggcgctataaagagtggagattcaaccaatatatattcaaatttagaatataatgttgcatcaattaatgtttcagttggagatgtagtaaaaaaaggggatgtacttgcaacaatagatacatcaactcttcaagaacaacttgctgaggcagaacaaactctaaatgcaaatgagcaaaaaaatcagttatcattaacaagtgcaaaacaaaaatatgacaatttacagtatttacatgataataacttacaaactgatataataaatgcagaaaaatctgttgatagtgcaaaactcgatatggaagataagagtaaagtttatgaatatgataaggtcatgtttcaaaatggcgaaatctctcagcaagatttaaatacagcaaaaaccaattatgaaaattccaaaggagtttatgataaatcaacagttgcattagaagcagcaaaagttaattctgatcaagcattatctgaagcaaaaacagcttatgaatctgctcaagcagctgctaatgataagagtagcaggcttgcatatgaagacaagaagaagaaattgcaagatgctcaggttgtagctactgtagatggaacggtaactaatgtaaatgctgtagtaggtatacaagcatctggagcattatttgtaattcaagatctaggaaatttaattgttaatgcaagtgttgatgaaacagatgtcgcaaaagtaaaggtgggacaaaaagctcaaataacaacggatgcatcaggatctgatattattgatgcacaagttgtaagtgttgaaccagtttctagtactgcaagtgcaagtacaagtacaactagcactagcaatggtaaaactagcactagtactagctctaccggtaacactacaagcagtgatgtatctttcacagttaaggtacagttaacaggtaaaaatgataaggtgaaagttggtatgaattcagtagtaaatattattacagatgaaaaaaatgatatctattcagtgccatatggagcagtaattaataataatggacaaaacgaggtttatgcagcagttgaacagggtggaaaatatattgtcaaggaaattcctgtaactaaaggtatagaatcaaatgcaaatgttgaaattgatggttctgatctttcagacggaataatcatacttaacgaaccaacaaattataaagttggtgatacagtacaaataagttctcgaaaaacaaagtagggggtgagtgtctttgagtaaaaatataatagaaatgaaagacattacaaaaagcttctatattgggactccaaatcaattaaatattttaaaaggaattgatattagtgtaaaagaaggagaatttgtagcaatagttggttcatctggttctggaaaaagtacattaatgaatattataggagcacttgatagagcaacttctgggaactatattttagatggtacaaatatcaatgaaatatctgataatggtttatctgaagtaagaaataaacaaataggttttgtatttcagacatataatctaattccaagaagttcagctttgaaaaatgttgaattgccaatgctttactatggaatgagtaaaaaagatagaagaatacgtgcagaagaacttttagatcttgttggaatgaaagatagaatgtctcatcaaccaaatgaactgtcaggaggacaaaagcagagagtggctattgctagagcattagctaatgacccaagtataatacttgcagatgagcctacaggtgcactcgattcaacgactggaagattggttatggatttgtttcataaagttcatgaacaggaaggcaaaaccattgtatttataacccataatagcgaacttgctgaggaaacagaaagaattataactttgaaggatggaaatataatatctgaaaaaaagaatgatatgtactacagaagatttccaaaagaggacaaagtatgtttataaaagaaaatataatgcttgcagttgcagggcttaaatccaataaaatgagagcgttacttacaatgcttggaataataataggtatagcgtcagtaattggtgttgtttcagtaggaaatgcaatgacctcttctttaacaagttcaatgtcctcaatgggtgcaactaatattacagttaacgtgcaagaaaaaagtactacaagtacattaaattcgttgaattccgataattcgaatttaaaggacaaaaataattcgaattcaaaaaattcaggttcgaaaaattctaatagttcaaactcgaaaaactcaaatggcaattcaccaaataatagtggaggcgcaaagtcaggcggtggcgcaccacaaggtgggggcggagtgccaggtgcaggcgccatgaaagcagcaagcggaggagcaatgcctccaggaggttcaggaagacaaggaaaatcaagtagcactgcaaaagatattgaccttatgacaatggaacagataaatgatttacaggaaaactttagtgacgaaataagttctataagtgtatctgaaagtggtagctcaggtaaagttaaaaatgattcaacgtattctaatgtaagcacagtagggacaaatgttggatataaagatgttaaaaatttggaaatggccgaaggtagatatctttcacaaaatgatattgatggagcaaaagatgttgcagtagtttcagataaattagtatccaagatatttggaacaaatgtagatcccataaatcaagatataaaagtttatacatcaaatgcaatttacacatacacaatagttggagtatataaatataaggcttcgggaggaaatagaacaacatctgatgaaaatttaactactgacctatatattcctgttactgtaacaaagaagacagcaactaataaaaattaccagacatttcaaataaaggcaaaagatgaagtgaatgttcaatcattcactaatgaattatcagactacttatctaagctttatgcaaaaaatgcaaagtttgaagctcaagcaagcaatatggaaagtatgcttgaatcaatgacatcaatgatgactacagttgcagtggctatatctgctattgcaggaatttcgctagtggttggtggaatcggagttatgaatataatgttggtatctgttacagaaagaacaagagaaataggaactagaaaagcacttggagctaaaagcagtcatataaagatgcaatttatagttgaatcaattataatatgctcgattggtggtattttaggaatattacttggtttaggtgcaggagcaattggttcaaaagccatgggatatgcaactacggtatcaccattggttattttaataagtttttcattttcaatgtttattggggtattctttggatattatccggcaaagaaagcagcggaactagatcctatagaagcacttagatatgaatagaatggattttagaataagctaatgttctaaaaataatttttaatgccatggagatattctgcattattactccatggcattattatattactattaaacaaatatttcataaattccgaaagcgattaatacaattccagaaataaaatttaaatatctaatcaaatattttgaaaaattgatatttcgattaaagtagcctatatatacaaataagatagaaataataaaatttaaaaatacacttatactaagattaacacctgttatacttgcagcaaaatttgtacaaatattatttacagatagtgagatggaaagagctaaacattttcttagatttatattatgagagttatctaaatttagaatataagaatcctccaagaggtttttatatttaaaagaactttcataataaaaggaagtatcgtaaccaagacgttttttttctaagcgaatattctcaactataaaagaaataccaatataacttaaaagaatagcaccaaatatattactgaccttaggatctattaagggcagaattaatttaccaatatacatagaaacaaatgtactagtagaagttactattgcaagtaaaatactatttgatttagataaatgtattttcttaattccataagataaaaaaactgataatgttactatatttgttgaaatagctagtaaaagaggtgatataagaatcatatggaactcctaaaaattattttagtataatatattcattttatttaaaaaaagattgtaatatgataaatttataagatattttttgtatttgattgaaaaaagaatgagatatttaaatattaaaagtcgtgttgtaaattttgcttaatattttataaacataaaggtttgatattaggtgatgcaacaaacatataaagaaatggatttgtcgtgaaaattcagttgtgtttaagggctatatgtaagattataaaggtataggaaattcgcctatagatgtgcttaagtaagatccctatataaacgatagaatttgataaatattaataatagctattgattatgtaaatataataacataatcaatagctatctttgtttaattagtttgattactccattttttgaaattaaaataattaactagtatgataataaaaagcataacagcaaatacgtataacgaatactttatactaattcctaaaaatgtataaagcaaaattattggtgtatctgcaaaaaatattgttaaagtatatttaataaagctaatttcagctaatacagaaaaaaaacaaataatgtcggtgggaacaactggtgaagatacccctaaagctagaagttgcacattattttttttaatcatgttgtatattttgggatatttatttactattttattctggtaactcattccaaacgtaagtcttgcaaagaaaaataatagaatttcacttaataaattcgctgttgcagttaaaataaatgcttcatatggattaaataatattccgccaataattataaaaattgtacaaggaattagtgtgaaaattcttagtgatgcaattatgaaaaataaaattgcactgaattttccatatgtatttaaaaaaaatattatcttattaactccatcactatataattgatatttaagaaaaacaaataagatagatatccaaaatataataacaatacccttgaatagcttactcattaaatttaccactcctttcatattgaacttagagacgtagaaaaaaagcttataatactcatatttccaccttactataaaccattttaccaataaattataagaaaatgttaaaaaattggaaatctttcgtttattttaagaattattaataacaataaagtaatagaagatattttagacttagggtataatatagtaaaaacataacatactagggggcagttgtatgagtaaatattggaatgataaagttagagaaatagagccttatgtgcctggggagcagcctaaggatagaaagtacataaaactaaatacgaatgagaatccgtatccaccatcagataaagttttagaagccatgaggaacgcggttaatggtgacttgaaactttatccagatccaacatgtagtgagttaacaagtgaaatagctaattattataagttagatgagaatgaaatatttataggaaatggttcggatgagattttggcattttcgtttatgactttcttttccaagaacaaaaaaatattatttccagatataagttatactttctataaggtttatgctgaactttttgatttaaattatgaattagtaaaattagacgataattttgatataccattggaagagctaaaaaagacaaatggtggagtaataataccaaatcctaatgctccaacaggaaaatatataaatacagaaagcttaaaaagtttaattgaagctaataaagatagagtagtaattattgatgaagcttatatagattttggtggccagtcaatggttaaatatatgcatgaatatgataatcttttagtaattcaaacattatcaaaatcacgttcattagcaggattaagagttggatttgcgctaggtcataaagatttaatagagggattaaacagaattaaaaatagtataaattcttatactatagatagagtggctttagctggggctaaagcagctattcaagatagtaaatattttgaggaaataactaagaaaatagtaaaaacaagagaaaaagtagtcaaggaattagaaaaattagattttagagttttaaagtcagaatcaaattttgtttttgctagtcataacaatgcttctgggaagtttatttatgagaatttgaaatgtcaaggaatactagtaagatattttgataaagaaagaatagataattttttgagaataacaataggaaccaatgaagaaatggatattttaattgaaaaattaagatttattttgagtaataatcaaaaagaattatgataaaagtatagcaaagttggatgcaatgtgctaaataggattacttttggaaatcatatttagtgaattgtatctaattttacttattagagaatgttattagtcatatagagtaagagttaaggatattgatataatgaaatttttgtctgaatttatgattaggcatttttgaaattaacaaagagattttaatttttgaaggaaggttgattttatggaattatgtgttaataaagaatacgttttagatgttgcaaaggagatattagaatttgatagtccaaccggcttctgctttgagataattgataaaataagagatatagttaaagaactaggatatagttttgaaactaccaataaaggttgtggaataataactataaagggtaaatcggatgaaaaaatattaggattatctgcgcatgtagatacgttaggagccatggttagatcaataacttcggatggaaaaataaagtttaccttacttggaggaccaattgttccgactttagacagcgaatattgtacaatacgaacaagggaaggaaagaaatatacaggaacattcttaagcacaagtcctgcagcccatgtttttgaggatagctcaagtaaaacaagagatccaaaaaatatggaaataagaattgatgaagaggttcattcaaaaagtgatgttcaaaagttgggtatttgtgtaggagattttatatttattgatcctaaaacaacaattactgagagtgggtttataaagtcaagatttattgatgataaaggtagtgtttcttgtttaatgggtttattggaattatttaatagagaaaaaatagttcctaaatatactacaaaaatattaatttcaacttatgaagaagttggacatggagcatcatatataccaagcgatatagttgagatgatagcagtagatatgggatgtattggcgatgatttaacttgcagtgaatatgatgtatcaatatgcgccaaagattcaggaggaccatatgattataatttagtaacaaaactaattaatcttgcaaaggataatgagcttaaatatgctgtagatatttatccaatgtacggctcagacgtaggggctgctttaagaggtggaaatgatatacgtggagcgttgataggaccaggcgtccacgcatctcatggcatggaaaggactcattatagtgcttttgaaaatactattaaattattatatttttacttaactaattaaaaaataatcataatctattagtaggattgcaaaattaaatgtatgttatataaagcagcttttgagataaaagataagtgatatagatacatttaagaaacgattttagtaacttttgcataatgctattatgcaaaaggaggggatggattatggatatagagaatttaaaaatgtaagcgagtttttttaaaagaaaataaaagaatttaatgagatattaagtggaattagttcatttagatatatttatacagcatgcgaaaaagataagattagtgatgaaggtttagttgaattcgatacgtttgaggaattgtttagatcattatagcaaattctaaagcgatgtaaagtttatgtattttattaatttggaggtatattatgaaagcatttatatttgatatggatggagtaattattgatagtgaaccaattcattttgaggtggatatgcaaacaataagagaattaggttgtgatatttcagaaaaagaattggaaaaatacgtaggatcaacaaatgaatatatgtatacggatataaaggaaaattacaatataaaaaaatcactggaagaaataatagattataaagtagaattgactaaaatgaagattattgaatctcatttagagccaatagatgggatcaaagaattgttgatagaattaaagaatagaaatattcctgctgcaatagcatcatcatcacctaaagatttaattgatatagttgtatcaaagtttaaattacaagaatactttaaatatattataagtggagaagaagttgaaagaggaaaaccatcaccagatatttatattgaaacatcaaaaaaattgggaatatcaccaaaagaatgtgtagttattgaagattctaggaatggagtatttgctgcaaaagatgctaaaatgaattgtataggatttaaaaatattaattctggaaatcaagatttatctaaagcagatatgattgttaactcaattcgagatatagatctaagtaatattctagaaaatcatataatttaaaagtatatagaataagtgaaaaaaaaagcaggtactattaaatttcctaaaattgatttttttaaaattatttgagattatacgtctaaaatggtataatttatatgaaaaaaatcaagggagacgattagatgcgacgcaataaagtaaaaaaaatagcaatattagcagtatttttatgtattaatagtattccagtaataacttatgcaaaagacgcaaggattaatggggaagttgtagaaaagagtggtgttgaaattaatgacaactggcttacagaagaagtggccaagcagttaaataaaaaagtggacaacttaacagaagcagattttttgaatatcaaaaaaattgatttaagccataagagagttggtaataatataccggaagaaataaagatgttaaagaatctagagtatctaaacttaaattcttgctatatatatgaagatattcctgattatttaggagatttacctagattaacttatttagatttaggaaataatcaattaaagagattacctaaaaatataactcaaaaaatagtaaatggtacttatacttattgcgatgttgaaggaaataagtttaggttagataaggggtggtattttttaaagggtaaatggtgctatctggatagaaatggaaataggcttaaaggaactgaaactatcgatggtaaggaatatcagttcaatgacgatggtaatgtaaaagatggttgggaaagcgataaggataagaattggtactattatgacagaatgaacggtgtaataaagaatgactggaaacagatatctggaatttggtactattttgataaagatggaaaaatggaaaaaggattgcaaacaataaaaggcattaaatatttcttcaatgataatggagcaatggcaactggatgggtaaagatagacaatagctattattatttttcaggatcaggagcaatgcaatatggatggttaactttaaatgataagatatactatctggatggtacgtcaggtataatggcatcaggggacacggttataaacggtaaaaaatatagattttctagtgatggttcattaattaagaatgtatggctagataattatacatatgttaatcctagcggtgaaacagtgaacacttcctctaattattcgcattcaggtacaaactatcagctatttaaatatatgactaatgtaaataatcaattaagtgtagatagtactgctgttgcattgcatgacggaattactagtaataactgcgtatattttacatctgaagcgttaagaagaataggtgttaatataccaacttcaacagcaaatacatatcagttagagaacatattaaagaatatgggatttgtctatagttatgatttctctcagattaaaccaggagatattgtatttacaaataattatactcatgtttatatttttatgggttgggataaagatggatatgcttatattgtagataaccaaaggacaagctttgggaattcggtattacataaaaggcttattcttcaagatactgcgacaacagatagagctactcatttcttctactatccatattaattctgttgttaatatgaatagaaaatatatgtgaatttttcttggatttttataaatgctagataaatttatagctataagttaaagtatatatctaaataaaatagtagcataacatatttaattatttcatttagcttaggctataacgagggtccttataattaataactttttattaattataaggacctttttgttgtgaaaaattgtaaataaattttattcatatatattgagcaattatagtataaataaaaatatgaatataatgtatggttgcaatggaaggagaaaagtttggtgaaagttcaagttgatatattttcaggttttttaggtgctggaaagacaatgttaatcaaaaagttattgtcagaaaaggtttatgatagcaatacggttattatagaaaatgagttcggagaagttggaatagacggagacatattaaaagaaagtaatattgaaattaaggaaataaattctggatgtatttgttgtcaggtatctggaaactttggagaagctgttttagaagttataagtaaatataatccgaacaatataataatcgaaccctcaggagtagcaaaattaagtgagatattaaatattctccaagaaaagaagtttcagcatgagctcgaaattagaaatatttttactttaattgatattagaaattatgatatgtatttgaaaaattttaaggaattttatgagaatcaaataaaaagagcaaaaactatagttttaagcagaagtcaacttgtagataataaaaaaattaatgcaactatagattctataagaaagttaaatttgaaagctaaaataatatataaaccatgggatttattaaaaggaactgattttcttagtacaaatgtaataaatgaaaaaagaaaaatttttgctgcaaattctagtattagctctagcgcaagtaagcagatgagaagagaagtaaatcatagtgcaaatgaaatttttgaaagctatccgatagatcttgaagaaaatataagtatgcttgaaattcaaaaaaaattcgaatttatttcaactaatgataagttcggaagaataataagagctaaaggtgtttttaaagcaaacgatggagaatattatcaatttgattatgtacctaatgaatttaaaagtaggaaaattagatggtcaaataagaaagtggtttcaataattggcagtgagttaaataaaaaggaattagaaaggttatttattaggcaaatataaaaattattgattattaaaactttgtagagaggtggtggaattatgaaaatacatattgagattgtgacaggttttttaggagctggaaaaacgtcatttataaattcacttttaaaagaaagtctagttgatggagaaaaagtactggtttttcaattagagcaaggagaaaaaaatattgtacattctagtaacataagtaattttgtaagaatccaggatgctttagacattaaagatttaaaagaaaaaatgatatactcaataaaaaaatataaacctaacagaataataattgaatataatggaacttctgatttaaaagaattattcgatatattgaatgaaagaatttacagagaatgtagtaaggttactactgtattctttattgcagatggtaagacattaaagcaatatattgacaatatgggaggatttataataccttttatacaaaacgccaatatgattgttattaataatatagattattgcaaaaaagaaattttaaatgaaggttttaaaaaagttaagaatataaatcctaaagcatttattttacgagttagtaataagtatattttaaattctacacttagggaagcaagggtattggacaatgggtgtttaaaaaagataaaaattaaaatgataaactacaaaaaaagtactaacataaaatataagggaaatgaggaaaatgtatgaatctttataagaagaaggttaaagctttctttattataagtgtagtaatactatcaatatatatttacaataaatatccaactcttatatatattgaagttataggagattttgcaagtatatttacaagtataattcttgaggcaatgccatttatcataataggatccctcatatctgctataattcaaacatgtatatcagaaaggattattgctaagataatacctaaagcaaatattttaggatatttaggagctgctttgataggtcttatttttccggtttgtgagtgcgcaattgttcctataacaagacggcttataaagaaaggcgtacctgttgggtttggagtaacatttatgcttgctgtacctataattaatcctgttgtaataatgtctacttactatgcattttacgataaaaaaattatggtgcttcttagaatagttggaggatttatagctgcaattttaattgggatgatagtaaattcgcttgaaaaagataagaaaggtttagtaatagattttatagataatgatagctattgtaactgcggatgtaattcatatgtggaaaatcaaaacaaattaagagcaataattgaacatacaaatagagagttcttggatataatgggatacttgatacttgggacatttatatctagcgtatttcaagtggcagtatctcatggagaaataaattttatttctaataataagattctaggaatagttgtaatgatgttgcttggattctttttatctctttgttcagaagtggatgcattcgtaggaaaaagttttttaactaactattcacttagtggagttacagcatttttaattttaggtccaatgcttgatttgaaaaatcttattatgattattggagcctttaaaaaaagttttgtacttaaattaagtataagtacaatagttgttgtatttgtaatctcctttttattcatgatgtgcggaatataaagatgcactttaaatgatagcaatttaaatataaaaaggagctgaaaaataagtgaaaagatttaattttgatgagtttttatggtttattgttcttatattgttagatttctctataatatatttaatatctactggaagtataggtttttatataggtagtaatatgattaaatatttttatattactataataatgataagtataattactgtttttcaaataaaaaatatatttacacctaaaggcagcatgaatattaaaataaaattgtttccaataatactagccttaataataggtttcatatctattaataagcagcaaacatttaaacattcagagctgaatttagaaattttagaaaacaaaacaagtgttattgatagaaagtcattatatgaacatgaatttgagtataattttaataagagcaacataagaaacaatgacgaaactataagaattgacgaacataatcctacaatgcttgatgatatacggattaatccagaaaaatatatagggaaaaagttagaaatacatggatttgtatgtaaagaaaattacttaaataaagatcaaataattataggaaggattataatgacatgctgtgctgctgattcaaaaatcgttggaatagttggagattatgataaatcgtatcaactaaaagaaaatgataagattaaagttataggggaagtaggtagctcgatgattaaagatgaaagcaatgtagagcataaaataccatctataaaaatagaaaaattagagatagaaaattaaagttaaacgtatattcatggaaatcactaataaaagtaatttgttaggtaaaaaagtatgaatatacgtttaatatgatttggtttaaattttaatactgtagtattttatatacaaaatccacaaactcttatcattatttagaaggatctgataaaataattgttacataagaaattttaccatttggttcattattagaaactacattgatcttaaatgtatcaaatttattattccattcaagtccagctggagatattgtagaatccgaatcatctgcatttattcctactaattttaagatgttagttccatcagctgggaatttcatttctgacttaggaattatcttaatttcgttacattttgaatctttatattttatttcaaaactataatcatctttttcataggtagccttatcgttttcttcgctaatagcttttcctaaaagtttttcaatttcactcttgtctttatctttaaaatcagtcaaagaagcaatttgtttaacttctacagtgggtttgttattttcgccaactatcttagaattactttgaggtgattgttcagttgtagatgttgtggaagactgctccgttgtattttcattattcaaatttgcagaatctttagtttttccacaagatattaatgcagttgaactaactgctgcaattaacaatagactaatgattttctttttcataaaaattttcctccaacattatgtgtatattttagtgagttttttggatataagtcctaaataacatagttcattgttctataaatacctgataagtttatgataaacatttatgaattgaacttcttagaacatatatatcgttacatcactaccgattatagcaccgattaagttgggtaattgtttacttaagaaaactttaataaaataataagttattattaattattatcgttaataaaattaatggaagaaaatcataaattaaagtgaaggcacatcaataattaaataattaactaattgttatatagagaataattagattagatataaaagagtgtgcagagatttaagtttattataaaaatgaaaggatactcattttaatcatttgggtgaaaaaataagtatccctaatactaatttgcttaagttttattaagtattataataaaattttatttgttaaatttgctactataagatttatttttttgctcatattgctttgaactagagttataattagcatcttctaaaactccgccaaaaactttcttttctttaaattgtatattaaattctctctcatatttttttattatattaagctgttgaacagttaaaatacatatagaagtaccatgagcgtttcctctagcagttcttccagatctatggagatattcatttaattttaatggcaaatccaaatggaaaacgtgagttatatcagcaacatcaagaccacgagctgtaacatctgatgagactagtatttttattttacctgttctaaagctttcaattgcaagttttctatcttccttagaaatctttccggtcatagcaaaacaatctttgctatgataattaagtttggctgttgttaattcaatatcctcattgttattaacaaagatgattgctttttctggtttcacagccacaagaacttttcttaaggtttcaaacttatcacgtctttcacataagataaacatatgctcaatattaggatttattaaaggcttatcttcactttttattattattggttccttcattagagacttcgcagtttctaatgtttcaggttttatagatgctgaaaatagcataagctgtctatccctcattgttgatttaacaatgtctttagtaacattagatctcttcggatctaataaattatctccttcatcaattactattgtttttatagtatgggcagttatttttttctttcgaattaaatctagaattctacctgttgaaccaacaattatatgaggttttatttctttaagtttttttatttgattatttatattaacgtcaccaataatagatagtgaagttatagggaatgatgagttctcagcaagaagcttaatttgatcttctatttgtttagcaagttcatgtgttggagccaatattaatccttgcatttctctctttgatgtatctattttatgaaaaagaggcaatagataagctaatgttttaccgcttcctgtaaaggcttcaccaattatatctttgccctcaagagcaggtaaaatagaagaggattgaattgaagttggtatattaattccttgtttttgtagtccttctattatacttgaatttaaatttaaatcactaaatgagttaatcattaatttctccttttatagttgaataatttttctatatatattgctaattaattatatccttattatgtgcatttttctagttaaagttacataatcccacagatatattatctgatatagaatgattatatatttatgtaaaaaaactactctctaaagcaaaatttagatttaaagtataaattgcattaaaacaatgaaaaaataaacaaacaaatagtgtttgaaaaatagataagaatggtataataagaaagatttatataatttctgattaatataatttaataaaataattgaggtgaaaatttaatatatgaataatgaattcactaaatttaaaataagtgatgaaatcctaaaatcaatcgagggacttggttataaaaatccatcaaaagttcaagaaaaagttatcccagagatacttttgaataaagatatcatagttaaatcacaaacgggaagtggaaagacggcagcttttgggattcctttatgtgagaaagtggattggaatgaaaatatcccacaaattttagtattaacacctacgagagaactcgctgttcaagtaagtgaagatataactaatataggaaggtttaaaagaataaaatctgtttcgatttttggtaaagaacctatatcagagcaggagagaaaattgaaacagaagacgcatgtagtggttggaactccagggagaattctagatcatatagatagaggaagtcttaatttagctcaaattaaatattttgttatagatgaggctgatgaaatgcttaatatgggatttatagggcaagttgaaggaattattagaagacttccaaagaagaaagttactatgttattttcagcaacaataccagaggaaataaaggtattatgtgataaatacatgaataagcctgtagatataagtattaataatcaaaaacttattaacgaaaatatagatcataatttatattatactaattatgaagagaagatagaaaaactaaatgatattttaataactgagaaacctgaaacagtagttatatttgcaaaaactaaagagaatgtagatacagtgtttcaatggttaaaatctaaggggtactctgttaatagaatacatggaggaatgcttcaaaaagaaagattaagcattatggatggatttagattgggcgattttagaatacttgtatcaacagatctagcttcaagaggcattgatgttaaaggaattactcacgtaataaattatgatcttcctgtagagaaggaagcatatgtacatagaataggccgaacaggaagagcaggggaaaaagggaaggcaataagcttttgtgttaatgaaaaagataagcttttaagtgaaattgaagagtttattggattcaaaattcctgtctataatttgcctgagaaaataatggttgaaaaggaaaaaagtgaagggattaaaacacttaaaagtaaaccgaaaagaaaagaagaaaaatcaaaaaccataaataacaatataacaaaaatttatttaaatggaggtaaaaaaaagaagattcgtgccggagatatagttggggctatttgtaaaatggatggcattaaatctgaagatattgggatcatagatgttcaagattcagtatcatatgttgatatattaaatggaaaaggaaaacgagttatagatgaattaaaaaatataactataaaaggtaaaattattaaagctgaaaaagcaaaaaagtaagtatgttaatataaaattttaaagaatgttaacataaataatattaagtggtattatagatagtgaatatgaaatcttattaaatataggaaataaaagtaaaatgattactagtcttttgcattataaaattataaataccatattacttaaaggaagctaagcttaagatgttaaaattttggcagagaaagaatatagatgagcatttaaattgatttaggtgtattatatatatagctgaatatttgatgacaaaaaactaaaatattaataaataataatgtattataaagaggtgttataaaaacaatgatcttagatagaaatgaaaaatgttggtgtggcagtgggttgaaatataaaaaatgtcatttagaatttgatgaaaaaattgaaagttttaaaagaaaaggccatatagtcccaccaagagatattataaaaagccaaaaagatatagaaggaatcaaaagaagcgctaagattaatgatggggttttagacttagttgcaagtaaaattaaagcaggaatgagcactgctgatatagataaattagtatatgactatactatagaacatggggcgattccagcaccattgaattttgaaggtttcccaaagagtgtatgtacatcaataaataatgaagtgtgccatggaatcccagatgaaaatattataatcaaagatggagatattataaatgtagatgtttctacgattttagatggatattattcagatgcatctagaatgtttatgattggcaatgttagtgaagaagctaaaagattagtagaagtagctagggagtgtatgataaaaggaattgaagctataaaaccttggggattcttaggagatataggtgcagcgtgtcaggaacatgctcataaaaatggatatacaatagtaagagcattaggtggacatggaataggtaatgaatttcatgaagatccatttgttcctcatataggggagaaaggaactggaatgttgcttgttcctggaatgattcttaccgttgaaccaatggttaatcaaggaacttatgatgtttttgttgatgaagaaaatgaatggactatttatacagccgatgatgaattatcagcgcagtgggaacatacagtgttgataactgagactggaatagaaattttagctaagtaatatataaggtagttaaaagtggtttttaaatcaattttgactaccttgtttaatggaagtattaatctaaggagtattattaaatggataatgtagctttaaattatttggagaaatattatggatataagtcatttagaaaagggcaagaagacataataagtaaaataataaatggagaagatgtacttgctataatgccaactggaggaggaaagtcaatttgttatcagataccagcattgatgctagaaggaataacaatagtaatttctcctctaatatccctaatgaaagatcaagtagatacgctaaaagatatggggataaaaggcgctttaataaatagtacattgagtgctatagaagaaaaagaagtaataaacaatttggaaaatagtgaaataaagattctttatatagctcctgaaagattagaatcttttgagtttttgagtgttatttctaaatgtaatatttctcaaatagctatagatgaagctcattgtatttctcaatggggacatgattttaggggaagttatagaaaaatatcaaattttataagtttacttcaaaagagacctataataacagcatttactgcaactgcatcacaggaagtgagagaagatataataaatcttcttaaattgaataatccaaaagtctttataacaggttttgatagagaaaacttatctatcagcgtgattaaaagtggtaacaaaaaggaatatttatataaatatatagaaaacaataaagaagtttcaggcattatatatgctgcaactaggaaagaagtcaataatttatatgaatctttgcaagcgaaagggtataatgtgacttgctatcatgcgggattatctgaaaatactagaaaagaaaatcaagaaaattttatatatgatagagctggtattatgatagcaaccaatgcttttggaatggggatagacaaacctaatataagatatgttgtacactataatatgccaagaaatattgaaagttactatcaagaaattggaagagcaggaagagatggagaaaagagcgaatgcgtattattattttcgcctcaagatgttcaggtccaaaagtatttaatagaaaactcaatagaagatgtagagagaaagaacaatcaatatagaaagcttcaacaaatgatggattttgtatatagcaattattgctatagaaaatacgttttggagtattttggagaaacatataatgggcaatgtgataattgcagtaattgtttgagtgaaggagagtttgttgataagacaatagaagcgcaaaaagttctttcatgtatatacaggatgaaagttaaatttggaattggaatgcttgtagatgtgcttagaggatctaaaaataaaaaagttattcaattccattttaacgagctttctacttatggattaatgaaagaatattcagcagaagatctcaaaaactttattaatacattgatttctcatggatatattaatgtggttgaaggtacatatccagtgttgagtttaaatgatagatcaagaaaagtattaacatctcaagaaaaagttcaattaaaagagtttagagtagaaaagaaagctagtgaagaaaatgaactttttgagattcttagaaatttaagacaagaactggcaaaggaaaacaatgttccaccatatataatattcggtgacgttacactaaaagaaatgactgtaaattatccgatatcaaaatatgaaatgcttaaagtttctggagttggagaagttaaatataataaatacggaaaagtatttgaagatgtaatacggaattttgtagaagaacatgaaattgctatacctgatcatgatgaaggcttgctagacgaacaaaagagtataaataaagatgaagaatctagagtagaagttaaaacagacttagaattatacgagagattagacaatgcaagaaaagaattcgctaaagaagaaagagcattaccccaagcaatactgacaatgaatactctgaaggaaataagtggaagatgcccgggttctttagatgaattaaaagatataacaggcatgggacccaagaaaataagtttgtatggagaaaagataataaatgtagtaaacgaatatttgtcagaaaatgatagaaaagtagaatggactgaaagaaaaagaagaaaggttataattgatggagagactagggagaatgatcaaatctcaatagatatgcttaagcagaacataactatacatgaagtatctcaaaaattagagatctcaatttcaactatcctaggatatgtaacagattatataaaagagtttggagaaaatgcatttcatataaatttagaagaattttacaataaagaagatgaaaagctaataataggtgcatgccaaaagcatggatatgataagataaatgtactaaaaaaagaactaccttcacatataaaatatgaaagcataagagctgtaattttaaaaaagtactatttgtagtcaattaataaaatctattagattatttaggaccaaattaattacatgtaagaatattactaatttttattaaatatatttaatagtagaatagaagatagagtaaagaggtgtaattaaattggatccatacgaggttttaggcgttgaaaaaacagcttctgaagaagaaataaaaaataaattcaaagatattttagaagaatatacacaaaatcaaaatgagaccactaaacaaaaagttttggctcttagtgcggcatatgagctcattattaatggtaatctatataaagaaattcgtgatttagtcgataataaaaacttttctgaggctgaagcaaaattgaacttaataaataatgcgaattcagcagaatggaattatcttcaaggttttatatctgttcaaaagggatggtttgacagtgggcttaattacttgaaaaaagctgtagaattagatcctaataaccatgaatatttggacagcttaaacaaattgcaggcaagagtcattgattatatgaaaaaatatgcaaataaaaatgttaaacctaattctaatagtatgaatgcttgcggtggagataataatagtagtggtaacgggggaatgtgttagtatatatgttgtaatcaaatttcaagattctactcttaatttagcgttttgcttactagagtttttaatgtaaatttatttattaaaacatatatatatattaggattttaaatttaacatatatagataaagtttataatttgtgttgaaattttgaaatatttatgttattctaaataagcagttggtacgtaaagtgctaatgtggagcttagagtgtccttcgccggtctctaagctcctttttgttttagtaaaataagctgtaattaaattaaaaatcaaatttatgttttaataatataagtatgtgaatgatatattttgttaaattaataaaaaagtgttagaagttacattgataagagaaaaaaagttctataaatatatttttcaaccaacaaagttaaaaatatatttaatacatgatataatagtaagtatcactttagattttacgaaagtattttcaattaaatgttaaattaagcctagaaattaaagttttacatttgtttaataaaaagtaccaaaacctatatttttttttgtatataataatgaccggagaagggagcgtatgtcatgctcgaatgtgttttaatagatttaaatgttgataagaacacaagtataaatgaacttattgaaaatcatatgccttttataataaaaagtatttcagatgtgacaggtcgctatgtatcttgcgaaaatgatgaagaacttagcgttggattacttggttttcatgaggcaattgaaagatatgataatgagaagggacattttttatcttttgcaaaattagtaattggaagtagaataaagaattacttaaaaggtgaaaataagcataatcattcatctttggacgaattagtggacaaaggtttggattttagagatgaatattttgagcctaaggaagataatagcatgttgctggaagaaataactgccttaaagaatgaaataagttcgtttggttttactttggaagatttggtgaatgaagctcccaaacaacaagcaacgagaaagaatgcaattaatttatcagaagaaatatcaaaggatgaagaatttttatcttttatgtatttaaagaaaagattaccaatcaaaaggattgttttaaagttttcagttacagaaaaggtaataaaaagaagcaaaaaatttataatttctgttgtaataataattgataaaaatctcagtgctttaaaaaattggatcagaaagtaggtgaaaagaatgaataggggaataataatggaaattaaaaaaagttatgctatagctttaaatgataatggcataatggaaaagattgaacctaagaaagatatgaaaatagggcaaaaaatattttattttgaagatgatctcattaaggctagtaatagtgggacttataggtataataactttattaagtcaattggagcaattgcagcgttgtttttaatagtattcaccttctttcatactatgaaatctgatacagcatatgcagttgttagtttagatattaatcctagtatacaaatagaagctgataataaattgaagattattagagttgaaggtgtaaacaatgatggaaagaatatagattttacagatgttaaaggtatatctcttgatgaaggaatacaaaaaataaaggaaaaacttatagagaaaaaatatttagatactaatagggaagtattggttggatttgcatttataaaaaatgaagataacagtgcttatgagaaagatataaaggatgttattcaatctacctttaatacagaaaaagttacttatgttaaaggtgataaggaagatgttgatgaagctaagacaaaaggaataagcttaggaagatatgaagcatctctagtggtagatgagagtacaaagaataaaatagatgtagcaccagtaaaagaaattactgcaagcataaaagataaagaaaatgtaactcagtgggatgcaaaagatgaaaaaaatagtgatgtcgttactccagctactaattcaaattcagatgcaaaacctgaaaaaacaactgtagataagcctgtaataaatggagcagctgacaattcattacctaatgtggattcggggaaagctacagataaccctaaaaaagaacaaaaggatgatggtgtgttaaatttacaaccagaggttcctgcacaaaatgagaatgataacaagggaaatacaccagtgacaagtcctacaaaggatgacaatactattaatataggtccagataacggaactattgtaaataatcctacgtcaggaaaaattcaggaagatcctaataagactatacaagtaccaaaaactgacgagaatacagctaataagactgttaaaaattaatgagttatttaagagtagatttatctagatgcatagtatcaaagatagatctactctttatttttacatgcaatttggctgaaaaataaatttatcaataggaaaatcgtattaaaaaagaggactagaataaaaaattatagtatacttactagtaagcattattaacaaggatttggggagattaaaaatgataaaagagctattaaaaaatgatatactaatatgtgatggagcaatgggaacatattattcagaagtaacaggtaatgatgtatcctattgtgaatttggtaacttaaatgataaagaaactataaaaagaatacataaagagtatattgaagcaggggctaaactaattagaacaaatactttttctgctaatacatatgatcttggagtatcgttagaaacattaatggacataattaagtcaggaataaacttagctaaagaagtaacaagaaatacttctgttttaataggtgcaagtattggacctattaaaacagataatttagatgaatttagcaatgaagttttagaagaatataaatacatagtagattgctttttaaaaaatggtatagatatttttatattcgaaacttttagcaactataattgcctgaaaaaaataagcgagtatattaagtacaagaatatagatagtttcatacttactcagtttgctgttaagccagatggatttacaagagatgggttaagtgcagctaaattgattaaagaagtgcgaaatacaaaatatatagatgcatttgggtttaattgtggttctggcccagcacatatattggaaatggttaaaaaaattaatatagaaaatgaaattgtttcggtgctgcctaatgcaggttatccagagataattcacgaaagaacagtttatccaaacaatccagtatattttgcaaaaaaagttaatgaaataaggtcttttggagtttctattataggaggatgctgtggaacaaatccaagctacattaaacaactaacccaaatagttaatgagaattctaaagtagtcaatgctaatgctaaagctgagccaaaagttaaaagttttgagaaaaaggctaagaatacttttaaagataagctcgaaaatggtgagtttgttgtagctatagaattatcggcaccaattgataccgatatatcaagaattatagatggagctaagatatgtaaagaaaacaatattgatttagtaacagttccggattcaccaatgtcgaaggttagggcagattcaactattatatcatctaaaatcaagagagaaataggaattgaagctatgcctcatgtttgttgtagagataaaaatactaatgcaataaggtcaagtctgataggatctcatattgaaaatataagaaatatccttgcaattactggtgaccctatatctgatgctagtaaagttgaaacaaaaagcgtatttaatttaaattcatttaggctaatagaattaatagaaagcatgaatgaagaaatattcaaagaagatagtatttatgtaggtggtgctttgaatttgaatgttttaaataaagaagtagaatataatagaatgatgaagaagatagaaaaaggtgcaaagttttttttaacgcaacctatctatgatgacaatgctatagagttcttgaaaatgattaaagagaggactaatgtaaagattttagcgggattacttcccgttgtaagttatagaaacgcaatgtttttaaataatgagcttcctggagtaactataccagataaatatgtacaaatgttttcagaaaatatgagcaaagaagaggcacaagaaatcggtgtaaaaattactgtggaaataggaaagaaactaaaaggtattgcagatggattatatttcattactccttttaatagggttaatatgttaattgaaattattaagcagattaatgcctaatcattatagttcttatatgaataataaaagacaagagggatttttatgaatgttggtcttatcagacattttaaagttgattaccgtaaaagtttttttatgacatcaaaagaatttaaaaattgggaaggaaattacaatataagtggtgtgattagaaaagatgtagagcttatggggataaattgggataaatgttattctagtacgcttataagagcaataacgacagcacaacatgtatataaggatgatataattcaaaatgatctaattagagaaactatcattgatccaatatttaaaagtaatttaaagcttccgtattggttttgggcgattagtggaagaatagcgtggtatttcaaccataaatctcaacaagaaaataagattattacaagagagaaagctgagaagtttgttgatttattattaaatgaggcgagaaaagaaggtacagaaaacattttaattgttacgcatggtttttttatgtatagtcttcagaaagaattgaagaagaggagctttacgggcaagttaatatacagccctaaaaatggaatcctatatttatataaaaaataatagaataactataaatttatgtttgaacaaaactttatgtaatataaagaaatataaggacagagtcaataaaatatgctatattttattataaaaagtatagcatattttttgatatatattattgaaataaatactaaattaagttagtatactttatatacaaatgatgataaggaggaagacaaatatgataaataataataatttgattggcgaagcaaatagatgcttgctatgtaagaaaccagcttgtaagtctaattgcccagtagaaacacctatacctgatattataaatatgtataaggaaggaaaaattgaagaagcaggagaaatattatttgaaaataatccgctttcagcagtatgttcattagtatgtattcatgaagaccaatgcaaaggaaattgtataagagggattaaaggggaaccaatacgatttcatgatatagagcaggaaatatctcaaagatacatagaagaaactaggtttaaagctgtttctaaaaagaaagacagaattgctataattggtggtggtccagcaggaattactattgcatttatactagctaggaaaggatataatattactatttttgatgcgcacgagaagataggtggagtactaaggtatggaataccagaatatagacttccaaaaaaattagtagattccattgaagaaagattaatagaacttggtgtaaaagttaggcctaatactcttattggtcctgtaataacattagatagactatttgaagatggttataaagcagtgtttattggtaccggagtatggaatccaaaaacattaaatattaaaggtgaaactttaggaaatgtacattttgctattgattatttaaaatcaccagagaactataagctaggtaataaagtagctgttatcggagctggtaatgtagccatggatgccgcaagaagtgcaaaaagaaatggagttgaggatgttacaataatatatagaaaaggttttgatcaaatgtctgcaacaaagcaggagataaaagaagctaaggaagataaaattaattttgaattatttaaatcgccattagaaataacagaagagggagtaaagttagttaatactgagaatgtagtagagtcagatggaaaagttcaaaacaaacttattgaagaaaaagaagaatttttcaaatgtgattcaataattgtagctgtaagtcaaacccctagaactaatatagtttcaaatacaacaaaattagataccaataaatggggattattaataacagatgataaaggaaatacaactaaaaaaggtacattcgcgtcaggtgatgttgttactggtgctaaaactgtagtagaagcagtagtgcaagccaaaatagttgctcaaaccattgaagattactgtgaaaacaactaaataataaaaattaaatataacattgataaattaaggaaaaacaattaaaatcgtataggttgcaaaaatgaattttaattattaaaatattattagaagtagattaagcttttttatatactgtgattatcgtagatggtgaaaaaagtttacttaataaggagtgtaaagaaaatatgagtgtcactataaaggatattgcaaaattagctaatgtttctcatacaacagtgtctagagcacttaataatagtccgtatattaatgaagaaaccaaggttaaaattatagctttagcaaaagaattgaattatgtaccaaattatagtgctaagagtcttgttttattaaaatcatacgttataggtgtatttttttcatcgattagcgaaggaacatcagatacattctttcacgaaattataagaggagtcaataatgtcatagataaagaatataatttagttgtaagaggtatagatgattatcaatactcccatttaattgataacagaaattttgatggaataattgttgtaagtcaaagtaaaaatgatgatgaattcatacagactattctagaaaaaaatataccaactgtagttataaatagatacattgaaaatgaaggattagtaaacataatgtcagatgatacaaaaggagtttacgatgcagttacttattttatagagaacgatcatagaaaaatagcattattgcaaggaaataaggaatttgaatcaacagtatatagaaaaagaggatatataagagcgttggaggataataatattccaattaatgaggaatatattttaagtggtagatatgatctgaaaagtggatatgaaaatatgaaaaagttacttaaattagagaatgttccaacagcagtattttgcgctaatgatgatattggggtgggtgctatgaaagcaatatttgaagctgggttaaaagttccagaagatatctcaattatagggtttgatgatagcaacttctgtaactatgtaactcctccgttgacaagtgtaaggaaggattctttggcgatgagcgaatatggcggaagaaacttattaaatcttataaagaataaagaagtagataaagaaaaagtttatatacaatctcagcttgtggtaagaaaatcagtaaaaaaactttaataatggattttaataattagtgaatttaagcactaattattaaaaaaagttgttaacgttcacaaaaaagtgttgcgttatttgaaatatgatattataataaagttatcaagtagatacaagaaaatgttcacgtgaacagggatttgcacgtatttttgttcacgtgaacaaaaaagaaaagaggattttgatatgaaaaagtttatggatgaaaattttttattaagcaacgaagtatctgaaaaattatatcataattattcagaaaaaatgccaattattgattatcattgccacattaatccgaaggaaatattagaagacaaaaagtttgaaaatataactcaagtatggctttatggtgatcattataaatggagacagatgagaactttgggcatagatgaaaaatatattacaggagatggaagtgattatgaaaagttcttagcttgggcaaagactatatcatttgctatcggaaatccactttatcattggacacacttagaacttaagagattctttggaatagatgaagttttaaatgaaaaaagtgcacctgctatttgggaaaaagttaataagctgttaaatagcgatgattttacagtaagaaatcttataaagaaatcaaatgtaaaagttatatgtacaacagatgatcctatagattcattagaatatcatttagcaataaaagaagataaaagctttgatgtgaaagtattaccagcttttagacctgataaggctctaggagttaataaagaaacatttgaagattggtttaacaaactagaagaagtagttggttctaaaatttcaaactttgatgaatatttagaagcattaaaaaagagagtggaatattttcatgaagctggatgtagagtatcagataatgcattggattttgttccagtaggaaatgcttcgttagaagaagttagagaaatttttgcaaatgcacttaaaaatggacaagtatcttttgaagatgaaaataaattaagagtatatatattaaagttctttggaaaattatatcacgatctaggatgggtaatgcaatttcacatgaattgcgttagagataataacaaagtaatgttcgaaaaattgggacctgatacaggatttgattcacttaatgatacagaagttgcaattccactgtcaaggctattagatgcattaaatagtgaaaaagctttacctaagactattatatatagtttaaatccaaatgataattctacaataggaacattacttggatgcttccaaggagacggaattaagggcaaaatacaatttggatcagcttggtggtttaatgatcataagattggtatgcaagatcaaattagaactttagctaatttaggtatgctaagcacatttgttggaatgttaacagactctagaagctttttatcttacacaagacatgaatattttagaagaatactttgcaacgtaattggagaatgggtagaaaatggcgagttacctaacgacattgaacatttaggacaaattgtagctgacattagttataataacgcagacaaatactttaatatgtaatcttttatgtatgaaaataagtgagatgcttattttcatacaataaatacaaagatgcagatgaagtgaagatttaggaggaatagctgtgaaattaaataagaaattatataaagaatttaaaacatatccagaaaaagtattgcaatttggcgaaggtaattttttgagagcttttgttgattggcaaatagacaaaatgaatgatgaagcagatttcaacggaagtgttgtagtcgttcagccattagagaatggtcttgtggacatgcttaatgatcaagattgtttatacactttatatttacaaggggtccaaaatgggcaagcatcaaaaactcataaagtaatcaatagtataagtaggggaattaatccttacagagactataatgaatatttaaaagttgcagaaaatccagatttaagatttatagtgtcaaatacaacagaggcaggaattgcatttgatgaaaacgatactttaaatggaggatgtcaaaaaagttatccaggtaagctaacagcatttttatatcacagatttaatgcatttaatggagatgacagtaagggatttattataattccatgtgagcttattgatagaaatggtgaaaaacttaaagaaatagtattaaagtatgcagaagtatggaacttaggacaagactttattgattggataaacaatgctaatactttttgctgtagtttagttgatagaatagttccaggatatccaagagatacaattgatgaagttagagaagagcttggatatgatgataatttagtagatgtaggtgaaatatttcacttatgggtaatagaagggcctcagtctataaaagatgaattaccaatagaaaaagctggacttaatgtaaaagttgtagatgatatgacaccatatagaacaagaaaagttagaattttaaatggccctcatacagcaatggttccagtagcatatctttatggattagaaactgtaggagaatctgttgatcatgaggttataggaaaatatgtccatgatgtaatatatgatgaaatcatagaaactttagatttacctcacgaagaattagttgaatttgcagatgcgattatagaaagattccaaaatccatatgtaaagcactatttgatgagtatagcattaaattcattatctaaatacaaaacaagagatttaccaagtttgactgaatatctaaagagaaaaggtgcgcttcctaagaaattagtattctcacttgcatccttaatagaattctataaaggaaaaagaggagaagaagatattcaattagcagatgatgaagatatattagaattatttaaggaattatggggaaaacatgatgggacaaaagaagggctaaacaaaattgtaacttctgttcttgcatatgaaaagaattggggaagcaatttaaatgaaattcctaatttaactgatgaagtttcaagatacctagaaataattgaaaaagtaggaatgaaagacgctgtcaaagaagtcctataatgaaatttattatcatgcaattaaattttcttaattgcatgataaataaatatatataaaatatgaataataaggaggtaaataaatgagttttgatgaaaattgtttttattgttcacagaatcaagatttagattctttaatgattaagatttgtgatttggatgtatcaacagtatatttgtttaaggaacaaacttatagtggaagatgtaatgttgtttataaggaacataaaagtgaaataggggatttgactgaagaggaagctgcagctttcataaatgatgctagaaaggtagctaaagcaatccataaagcgtttaaccctgataaagtaaattatggagcatttgctgatacgatgaaacatcttcatattcatattgtacctaaatatgaaggaggtccatcttgggggaaaacttttgagatgaatccacaaaaagtatatttaagcgatgatgaataccaaaacctaatttgtaaaataaaagataatttatagtattgaattaatgaataaaaattaactaaattaaagatacggaggaaaaagaatgttaaattctgttgacaaaaacgcatcaactaatgctaataatggaaacgttaaattaagtttaagagaaaaaatttcttatggttttggagattttggtaatggattcatgtttgacttaggtcaatcatatcttacaaagttttttatagatacatgtggaattagtgctggagcagttggtggtatatttgcatttacaaagatattcgatgcattcatggatccattagcaggatcgctgatagatagtagaaaagcaggtaaatcaggaaagtttagacctgtaatgatgatttcaagtataattcttgcactacttacaattattacctttactatgcctgagatgccactttcatctaaaattatatatggttatgcaacatatatgatttggggtcttgtatactcattcactaatgttccttatggatcattggcatcagttatgacaagagatgtagaggatagaagtcagctggctacatttagacaggctggttcattaggagcgcaattaataactggagtagcttttgtacctattcttatgatgtttagtgacaaaaaagttggttatccagttgcggccgcagttatggctgttataggagttgtttcattctttatctgttttgctaacacaaaagaacacgttgtagttaacagagaaggtaaatcagaaaaagcatctgctaaagattattttaaagttgtatttacaaatagaccattgttatgcttaattcttatgcaattatttacaatatcagctatgaatactaacaaccaaatgatgattttcttctgccaatataacttaggggatattaaacttcaacctaaggttaatggtataatgattggatgttctgtaataggtatattcgctattccgttcttagtaaaacattttggtaaaaagaaaactgcgattgcaggactattgattggaattgttgctaatggattaaactttataataccaacaaatgctactactttcacagttcttgttacaataggatatgtagctttagctattccaaatggagttacttgggcattcgtaacggatgcaattgactatggacattggcatactggaataagaaaagaaggtgtaacttatgctgcatttaacttttcaagaaaaattgcacaatctatggcagcccttgttagtgcagcagtattaggtatgactgggtatgttgcaaacgcacaacaaagtgcagaaacattactaggaattaagggagcaatgacattgtatccagcagtagctttagctttagctgctcttgtggtaggtatattacacaacttaccagatgacaagtacagaaaagttgctcaagacttacaagaaggaaaatgggaaaaaggaattttagaataataatgttataaataaatcattattgtttagctaagaagaataaggcactatcagctttgtattttgagagttgatagtgttttatgcttttatatttagtaaataaaaaatatatacttgtaaaaaactgttaacgttcacaaaaaagtattgcatatttttttgtttgatattataatataaatataacttaaataatttttaactaaaattgttcacgttaacaattgctcgacctctaattgttaacgtgaacgaaagttatttatcacgtctaaaatatttataaatattttagatgtgataatcaaagaaaaaatgttttgatatataaataagctataaacttatttaatatataacacagttcttaaaaatacaaaaatacataatatagaattcttcaaacctataattttcatactataatttattaatcatattttaagttaaccattttaagaactgtgtatttaattaatagtgatagcacaaaatagatttgttaaaaaataaatgtttgaaattataatatatattctgaaaaattagtttgaaagactatgaattttaaactaatggatattctaaagaataattttattatctaaaacctgtatatatattcattatgaagatattaattaagaaagaatttgaggtgtaatatgagaagagaagaagttttaaaaaatataaaagaagcaggtgttgtcgcagttgtgaggggagactcaaaagaagaagctcttaaaattgtagatgctgtttcaaaaggcggaataaaagtgatggaacttacaatgaccgttccaaatccagttgaagttattaaagaagttgctgaaaaatataaggataccgatgtaattgttggggcaggaactgtattagacagtgaaacggcaagagcttgtattttagcaggggcacaatttattgtaagcccaagtttagatattgatactttaaagctttgtaataggtataaaattctggttatgccaggagtaatgactgttaaggatgctattacagcttttgagtatggtgttgatgtggttaaaatattcccagccaatctgtatgggccttcagtaattaaatcatttaaggggccgcttcctcaaggggactttatgccaacaggtggtgttagtatagctaacttacatgagtggatagaagcaggagccttcgtagtaggaacaggaggagatttaactaaaggtgcaaaaacaggcgattatgatctagttcaaaggactgctaaagaatttatggatgcatacagaaaagcgaaggagagaatctaaaatggatgttttaacttttggagaatcaatggtcgtatttagccctaatattaatggccctttgagacatgttcatactttttccaagtcactcggtggtgccgaatcaaatgtcgctactgccctggcaaaattaaatcatagtgcgggctggttctcaaaagtttcggatgatgaattcggaagatttgttataagttctataaaagcagagggagtagatacatcaagagtaataattgataaagaaaggcctacaggattgctttttaaggaacgttatcaacgaagcaatccgaatgtatattattatagaaagaattctgctgctagtagcttatcgccagaggatattgatgaagaatatattaagcaagctaaaattcttcatattacaggtataacgccagctttatcggaaagttgtagaagagcagtatacagagcaatagaaatagctaaagaaaacaagatattagtatcattcgatcctaatatcaggcttaaattgtggacggttgatgaagctagaaagatcttggtggatattgctagtaaggcagatattgtaatgcctggattagatgaagcggaacttttattaggattaactaataaagatgatgtggcagattttttcttaaataaggaagcgaaaatagtcgcagtaaaattagggtcagaaggctgctatataaaagataaaaaagaaggagtcaaggtcgcaggatataatgtatcagatttaattcaagatacagctggggcaggcgatggttttgcagctggatttttagctggatatttagaaaaattatcactaaacgaaattggacaatatgctaacggtgttggagctatggcaacattggtacaaggagatatggaaggttatccatattatgatcaactgatggaattcataggaaagagacaaggtgttgaaagatagagttttctgaaacagatattactatatttctaacaattgaaaatgttagcgctattaaaagtattttcttcatataaaattttaattacatttaaggataagtaaagaggattattttgataattaaattttaagtgtattctatctctaaattataaacttcaaataatatttaaaataaacttttacttatctttaacaatgtatatataaaagttgatattggtaattgaagagatatgaaatattaaaatgatagcatttgcattgttaattgtccattgaaattagtttaagatatttttaatgaaaaaacttaggaggaataactaatgaaattaaataagaaaatatataaagaatttaagacttaccctgaaaaagtgctacaatttggggaaggaaatttcctaagagcatttgttgattggcaaattgacaaaatgaatgaagaagcaggtttcaatggaagtgtcgtagtcgttcagcctcaagaaggtggactagttaatatgctaaatgaacaaaatggcttgtttacactttatcttcaaggagttcaaggaaaaagagctataaaaacacataaaataatcaatagtataagtagaggaattaatccatatacagattataatgaatatttaagagttgcagaaaatccagaattaaggttcatagtgtcaaatacaacagaagcaggaatcgcttttgatgagaatgataagttaaatgaaggatgtcaaaaaagttttccgggtaagttaaccgcatttttgttccgtagatttatggtgtttaatggtgacaatagtaaaggttttattataattccatgtgagcttattgatagaaatggtgaaaaacttaaagaaatagtattaagatatgcagaaatgtggaatttaggacaagattttgtgaattggataaatgatgctaatactttttgctgtagtttagttgatagaatagttccaggatatccaagagatacaattgatgaagttagagaagaacttggatatgatgataatttagtagatgtaggggaaatattccacctatgggtaattgaagggcctcagtctataaaagatgaattaccaatagaaaaagctggacttaatgtaaaagttgtagatgatatgacaccatatagaacaagaaaagttagaattttaaatgggcctcatacagcaatggttccagtagcatacctttatggtttagaaactgtaggagaagctgttgatcatgaggttataggaagatacgtccatgatgtaatatatgatgaaattatagaaactttagatttgcctcacgaagaattagtggaatttgcagatgcgattatagaaagattccaaaatccatatgtaaagcactatctaatgagcatagcattaaattcattatctaaatacaaaacaagaaatttaccaagtttgactgaatatctaaagagaaaaggtacgcttcctaagaaattagtattctcccttgcatctttaatagaattctacaaaggaaaaagaggagacgaagatattcaactagttgatgatgaggatatattagaattattcaaggaattatggggaaaatatgatggaacaaaagaaggcctaaacaaaattgtaacttctgttcttgcatatgaaaagaattggggaagcaatttgaatgaaattcctaatctagctgatgaagtttcaagatatttagaaataatagaaaaagtaggaatgaaggaagctataaaagaagttatttagaaataagattataaattattattatagaatattcatatggctgttaaatttaaagttgtgaacaataatttaatggaagtaggtagagagcaatgaaagaaattataaaaataaatgaaaaagacaatgttgtagtagcacttagagatttgtctaaaagtgaaattatagaagttgaaaataaaaaaatagagataaaagaagatataaagagaggccacaaagtagctatatcagactttaaggttaacgacaatgtaataaagtatggatatccaataggacatgctattaaagatatatcaataggagaatggattcacacacataatattaaaacaaatttagatggaattatggaatataattttaatcaacagctaaaacaagtttctatagaaaatagaaatcttacttttgatggatataaaagagcaaatggcaatgtcggtataagaaatgaactttggatagtgccaactgttgggtgcgttaatggaattggtgaaagaataatcgaaaaattcaaagaagatgtaaaacctgttgggatcgatagtgttgaaatttttaaacataattatggatgttctcaattgggagatgatcatgcaaatacaagaactatgcttggaaatttagtaaagcatcctaatgctggaggcgtgttagtacttggacttggttgcgaaaataatacaatggctgaatttattgagtcattgggagaatatgattcaactagaattaaatttctagtatcacaggaagtttctaacgaaatagaagagggtgcaaagatattacgtgagctttatgaaaatatgaaagatgataagagagaatcagtatctctatcaaatttaaaagttggattgaagtgcggtggttcagatggattctcaggaataactgcaaatcctcttgtgggtagtttttcagatttcttagttgcacaaggtggaacaacaatacttacagaagttcctgagatgtttggtgctgaaacaattcttatgaatagagctaaagataatgaaacttttgataaaactgtacatttaataaatgatttcaaagaatatttcatggcttataatcagcctatatatgaaaatccttctccaggaaataaagctggtggaattacaacattagaggataaatctttaggctgtacacaaaaatcaggagattcaacagttgtaggtgtattaaaatatggtgaaactttaaaaactaatggattaaatcttttaagtggaccaggaaatgatttagttgcagcctcagctttagcggcagctggttgtcatatggttttatttacaacaggtagaggaacaccgtttggtacatttgttccaacaatgaagatatcaacaaatactccattatacaatttaaagccacattggatggactttaatgcaggaactttagttgaagataagactttgagtgaagtaacagaagaatttataaaatatgtggttgaagtggctaatggaaaatatgtaaataatgaaattaataaatttaaagagttagctattttaaaacaaggtgttactttataaaattcagcataagaaagtatacttgagtaaaaaatataaacaatttagcatattaaaattactttaatatgctatttttgttataaaaattataatttgtattttactgaatataatgaatttaattgagtaagttaagtataaatccttcaaagataaatctatatttaaaattctagcaagttaaataattaattaaggctaggatgcggaaactcaatttcaacataacataaataagagtaaatgattatagcttaattttttaataaataataatataaagaaaatcttattttgagctttaagtgggattatcacgattttgtttgaaggaaagtgaattgttgtgattgaaaatgaacacattttgtgatattataattacaaattttaaaaatgaaatgtagcattggggatagctgcgtttaaatgtacatgataaatatagaattaatataaaatattttatagtataaaatttgaaggggttttgaaatcatggaaattagctttgtaagaattgatgacagattaatacatggacagattgcaaccatatggtcaaaagcaagtggatgtaacagaattatggcgtgtagtgatgaagttgctaaagatgatttgagaaaacagttgttacttcaagtagcattaaaaggaattaaagcttatgtaataccaatagaaaccgctatcaaagcttataaggatcctaaatataaaaattttaaaactttatttttgtttactaatccagcagatgtgcttcgaatgattgaaggtggagttgatattaaatctgtaaatgttggaggaatgtgctataaggatggaaaaaaacaaatcactggtgctatatccgtaaataatcaagatatagaatgtttcaagaaactttacgagaaaggcattgaactagagataaggcaggtagcgaaagataacaagattaatttaattgacaggttaaaagaattgaaattcttatagataataacagtgaagtgctatataacctttaatagatagggatatagcattttttttgttaaaagttaaaattattacacaactatgataaaaaacaacagtaaaagttcaaatataatacaattatatggtaattaatttgcctgattcaggtattaatactataattttttacaaagaagttgtatttctattgaatatgatgaagaattaaaaaactaaatgtaaaaatgttttagagaggagaaatctatgataaagcctataaaaagagcagctgttttacatgatttatgcggaataggaaaagcggctttaaccaatgtaattcctattctatcaactttgggggtggaggtttgtccaatacctactatgatattaacaagtcatactggaggttttagaccaaacatagaaagattggatggatatataagtaaggcggttcaacactatcttgaattgaacatgaattttgaaagtatatttgttggatacttaggaagtactaataatattgaagaaactttacttttattagaatctgtaaacaagaatgaatcattggtagtactcgatcctattttcgctgataatggttcatattatagtaattttaataaggaatattcagatagcttaaaaaggataataagatactcgcatatcattacacctaactttacggaagcatgtattctatgtgatgaaaagatcgtagatgaagtaaatgaagaaaagctattagcgctttctagaaaattatatagttttggatgtgaaaacgtaataatcacaagtgcacctgtcgcaaataaaaagaaaattgggataagtgtatataatggagaaaatgattctttaaaattaataattagggataggatagaaaggtcttatccgggaactggagatgtttttacatcggttttgattggattaattatggatgacaattcattagaaaagagtgttgagaaatcgtgcaaatttgttgaagattgcattaaggaaagcagttcttatgattatccagcaaaagaaggattacttttagaaccaatattgtataagttaaataacttgaaacggtcaataaaagaatgaaatatttaaatgcgaataaaaacaatcaataaaaatcaatatatatgaaaattaatgattttttttgaaataaaatggttgatttttattgaaatataagttatgattatatcagaggagtgatgataatgtttacagaagaaaggtttaatatcattcttcaggagttgaaggtaaaaggaatagtatctgttactgatttagtaaaattactggatgcttcggaatctacaattagaagagatctaaatacacttgatagtgagggacttttaaagaaaattcatggaggtgcaattgcaataggggagagtacatccaagcacgattataaagttaatgttagacaatctttgaatgtagatgaaaaatctgaaatagcaaagcacgctgctgcattaattgaagatggggatatactctacttggatgctggaacaacaactgagatcttaatagattttattgaagccaacgaaataatagttgtaactaatggaatagttcatgcaaaaaagcttttggaaagaggttttaagacttttattgttggaggcgaagttaaagctataactgaggcaatagtaggaagtactgttgtagaagatttgaaaaaatataacttctcaaaaggtttctttggagtaaatggagtaagtaacgagagtggttatacaactccagatgtgaatgaagcaatggttaaagcccaagcaatgaaaatgtgcagagaatcatatgtattagcagatcaatctaaattagaaaaagttagttttataacttttggagcaatagcagattcaacattaataacaacaaaaattgataataatattagttatgatactaatgtaatagaggtggtaaaaaatgattaatacaataactcttaatccttctttagattatattgttaaagttgattcatttaaagttgattcactaaatagaactgaagaagaaaatatttatgcgggtggtaaaggaattaacgtatcgatagttcttaaaaatctaggggtagctaacacagctcttggatatgttgctgggtttactggagatgaaattctaagacaaatacaaagccatggtgtaaactgtgattttataaaattaaaaagtggattttctagaataaacgtgaaacttaaaagtgatggagaaacagaaattaatggatctggaccagcaataactgatgaagagttaaacctcttacatgaaaaacttttgcatctaacaaaaggtgattatttaatattatctgggagtataccaaatagtgtgccggataatatatatgaaagcattatgaacagcttattggataagggagtagagttcatagttgatgcaacaaaagatttgctattaaaggtattaaaatataaaccgtttttgataaaaccaaatcatcatgaacttgcagaaatgtttaatgtagaattaaaagatgatgaagacataattaaatatggtagaaaacttcaagaaatgggagcaaaaaatgttcttatctcaatggcaggggatggcgcaattctactacctgaaaatggggatcctataaaaagagctgttccaaaaggaatacttaaaaattcggttggggctggagattcaatggtagctggtttcttatgcggatatttaaaaaacaaaaatatagaagaagcgttcaagatgggaattgctacaggaagtgcaagtgctttctcagaagaattggcaacaaaagaacaagtatatgaactattaaagcaaatttaatggtggatttattctagtatgagttgactcttattatattataaagttttaacaagagtagtttaactagtattatgatttttacaaaagcataaaaatatatttaaattttaggaggctaacaatgaggattgtagatttattacacaaacaaggtataaacttaaattttaatccaaatacaaaagaacaatgtataaatgaattagttgatttaatggataaaacgggaaatttaaataataaggaagaatataaaaaagcaatattagccagggaagaattaagcacaactgggataggggatggaatagcaattccacatggaaaaacaagtgcagtaaagaaagcatctcttgcagctgcaatttgtaaaaagggtgttgattatgattcattagatggtcaaccagcacatcttttcttcatgattgctgtaccagataataatgataatttacacttagaagtattggcaagattatctactatattaatggatgaagcatttagaacaagcttaatcgactgttctgataaagaggagtttttaaggttaatagataagaaggaaatggaaaagtttcctgaagaggtaaagggggaattagagatgaataaaagtggttatagagtattagcagtaactgcatgtccaacagggattgcacatacttacatggcagctgaaagtcttgaaagtaaggggaaagatatgggagtctcaataaaagttgagacaaatggttctggtggtgctaaaaacgttttaacaaaagaagaaatagcaaatgcagaatgtataattatagcagctgataaaaatgtagaaatggctagatttgatggtaagagagtaattaaaactaaggttgcagatggaatacacaagtcagctcaattaattgaggaagctataagtggaaatgctccaatatatcatcatgctggaggagcagatagtagcgaagatgtttcaaacgaatctgttggacgccaaatttacaagcatcttatgaatggtgtatcacatatgttaccgtttgtaattggtggtggtatattaatagctttagcattcttatttgatacattcaatcctgctaatccaagtggttttggttcaggtacacctattgcagccgtattgatgaagattggtggtactgcatttggattcatgttaccagttcttgctggatttattgcaatgagtattggagatagaccagctctttcagtaggttttgttggcggtgctttagctagtgccggtattacttttgcaagtgcttttgatccaaaggttccagcagtttctggtggtttcttaggggcattacttgcaggtttcattgctggatatttagttgttggtcttaagaagttatttgcaggtttaccaaacagtttagaaggtataaagccagtatttttatatcctttactaggaacatttttaatcggtgttataatgttattcataaacccaataatgggatcaataaatacaggtatcactggtgcacttaactcaatgggtggtacaagtaagattcttttaggtattgttttaggtggtatgatgtcagttgatatgggtggtccagttaacaaagcagcttatctttttggtacagcatcacttgctagtggaaactttgatataatggcagctgttatggctggtggtatggttccaccacttgcaattgcaatatgtactacagtatttagaaataaatttactgaaaaagataggcaagcaggtcttgtaaactatataatgggattatcatttatttcagaaggtgcgattccttttgcagcagcagatccaataagagtactaccatcttgtataattggttcagcagttgctggagctctttcaatggcatttggatgtgcattaagagcacctcacggtggaatattcgttattgcaatagtaactaatccacttcaatacttagcatcaataatcattggtgcagtagttggggcaataatattaggaataataaagaaaccagtacaaaaataagatttatgggaaaataagagggtaagttaatataagggtataggaagcagtggaagttaaaaacagccactgcttcttttattgacttctaaaataaaatgaaaaatatttctataaaaaaggataaaatataggattttcttatatatcttttttatggatttgtatcatatgttacgtaaaaatataaaataatatggtattataaatttacaaataaaacataatataaataagtatttgaagtaaataagtatggatttttaaattgttttaagtttaaaaataataaaggttttattttctagttaaatacttttgctataggaggagaaaaaatatgagtttatttttaggaaagatacattattggttatttaataagattttatggtttgaaaaattagaaggtgagataataaaccttgcaaaagaagatggtttgaatgtagaagagttacgtaaagaaattaatgaaaagtatggtgagccaactccgaatcttccactagaagaaatgatagacacaagtaatatccatggatggttacaaggaaaaattcattcagcagagggaagaatggctgcgtggacaacaaaacttataaataataataaaggtgttactacaaaattagaagagatttattctagccaaggaattaaagctgcaagtgaagttaaagaaaagggaatggaacttacaaatgcaggtgaaatttttgaaagtatcaatgactatatcctagatggaatgccatgtgatagagtcaatgaagtaattaaagcagaagaagatatggttgaatggaagagaagagtatgcgttcatagtgatatttggaataaagaagaaggtgacgttaattatttctacaagctaagaagtttatgggttaaagaatttgtaaatgcagttaattcagatttcgagtatgttgaagatggcaacaatacaatggtgataagaaggaaataagatttttataattaagaatttttatggggtaataatttaagaataatagagtacctagccatatttttggctatacgatgattaaatttatcacttttatttgtaatgaaaatatgtaataggaggaaaagatatggatgctatagatttaatgatggaagaacataagtatataaaaagaatgttggtcgttgtaagaaaagcttgttttagattatacaaaggtgaaaaaataagttatgatgattttaattctatgataggttttattagaaactttgctgattctcatcatcataaaaaagaagaagtaatgctttttaatagaatggttgaagaaataggcccaactgctgaaaaaatagttaagcatggtatgcttgtggagcatgatcttggaagactacacataagtgaacttcaagctgcacttaaaaatctaaaaaatggggatgaagaagctattttagacgtaatttctaatgctatctcctatacgcatttattagagagacatattgataaagaagataaagttgtatatacatttgccaaaagagaattaaatgcaggcacattaacaggtataaataaggaatgtattgactttgaagaaataaataatcacataaaaaaagataatattttaatattagaagaattggagaaaaaatacaattcataggtaaatggtgttatagtgggaagcgactgtaacacctttatttttatataagtatacatttaatgggtgtataaaaaatactgatttatgtaatttagaaatcagtacagcctaattactttcttgattttttataagtatatggtttttgtgataaggctttagacaaaaaatatttttctaatgatagaatttgaataaaaaattatagcaagataaagtataaaaactttatcttgctataaaatatcctctaaagtatatttgctaaattcatcaacaaaagaattaatagatgacgataatattgcttttaatttacattttgaagtggaacaagtatgttttgcacttgaaaaacattcagatatagatatactttcctctgtaattattaatatttttccaaggtttatgtctttaggctccaacccaagttttaagccaccatttcttcctttagttgatattacatattcagttttacctagcctatgaacgattttctttaaatgatgttcagatatttcaaggttagatgccaattcttccacagtgcatattttatcttgattcttagctaaatatattaaaattctaaaagcataatctgaaaacttagataagttcaaattttcacaccccttctatagttttattataccttataataaaaaaaagtaaattggttaaaaataaaatgtgcatttgtattgcacattaaaaaaacctgtgctaatattaaggtgtatttaaaatgcactttaaaatttatacatataaagaaattatatataagaattacatttatggagtttagacaggtgttctgtgaaaaacatagttaattaaatattagttagataggagaattgttatggataagagtttgttaaaagtgtgtgatttaagaattgaagcagatgataaagagattttaaaaggattaaatcttgaaataaataaaggtgaagttcacgtaataatgggaccaaatggagctggcaaatctactctagccaatgctcttttaaataatcctaaatataaaagattgagtggagatatagaattcgaaggggaaaacataaatgaattaaagactgatgaaagagctaaaaaaggtttgtttttatcatttcaatacccagaagaaattccaggaataactgtagagaatttcttaaagtatgctaaaagaactacagatggaaacgtgctaaaacattttaagtttgacttagatttaaagaacaatatgaaggaattaaaaatagatgaaagctatgcaagcagatatttaaatgtaggattttcaggtggagaaaagaagaaaaatgaaatactacaaatgttaactttaaatccaaagttagcaattttagatgaatcagattctggacttgatgttgacgctataagaattgtttctaaaggtattaaaatgttctcaaatgaaaacaatggagttttaattattactcataatacaaaaatattagaaaatttaaaacctgattatgttcatgtattagtagatggaagaatagttaaaaccggagatggaagtttagctaatgaaattgaagaaaagggttatgaatcttttaaagaaaatgtagctatataaaggtggtgaaataagatggaaaacaaaaagaagacttatatagatgaaatggatagaggaatctatgatgttaaaaatgaagacagctttagttttaaatctgaaaaaggcttaacaaaagatataattgaaactatttcagaagaaaaaaatgaagccaaatggatgagagattttagattaagatctttagaaatatataataaattgaaattaccaacatggggaccatcattggatgagttagatatggataacattgtaacctatgtaaggccaaagagcagcttagttggttcttgggatgaagtgcctgaggatataaagaaaacttttgatttactaggaattccagaagctgaaaagaaatcactagctggagttggagcacagtatgactcagaagtagtttaccacagtataaaagaagatttagtaaaacaaggcgtaatttatactgatatggaaacagcgttaagagaacatgaggatttagttaaagaatattttatgaagtgtgttacacctaatgatcataaatttgttgcacttcatggagctgtttggtcaggaggatcttttgtgtatgttcctaaaggggttaatgttgacataccacttcaatcttatttcagattaaattcacctggagcaggacaatttgaacatacactaattattgtagatgaaggagcaaaacttcattttattgaaggctgctcagctccaaagtatagcgtaacaaatttacatgcaggctgtgttgaactttatgtaaaagaaggcgcaacactaagatatagtacaatagaaaactggtcaaagaatatgcttaacttaaacactaagagagcaattgttgaaaaggatggaacaatagaatgggtatcaggttcttttggttcacaaatatcaatgttatatcctatgagtatattaaagggggaaggagcaagagcagagtttacaggcgtatcttttgcaggtaaaggacaaaacttagatactggagcaaaggttatacacgctgcaccaaacacttcttctactataaactcaaaatcaatttcaagaaacggtggaaaagctacttatagaggagtgttaaaggtaaattcaaatgcctataattcaaaatctatggtatcctgtgaatctctgatgttagataataaatcaaaatcagatactattccagtaattgatttattaaatgatgatgttgaaattgggcatgaagcaaaaataggtaagataagtgatgattcaattttctaccttatgactagaggaataagtgaagatgaagctaaatctatgatagtaagaggttttgtagagcctatatcaaaggaattaccattagaatatgcagtagaaatgaacaatttaatcaacatagaattagaaggaagcatagggtaggtgagagaaatgaaggctatacaatttaataatttaaataaaactccaataagaactaaaagctgggttaatattaatgatataagccttggggaattaaatattggagaaattaaaaagtttgataatgtagaaatcaaaggatcagaaggcgttgatattcaaaagttagaaaatgataaaatattacctttatatagagagtttcaatatggaatcagcgaagatttaataaatcagggtaaagaagattttaaccaaggttacttaataacaataggcagaaatataaaaactgatgaaccaataattatagaatttaattttgataaagataatagttctttagtagataatttaataattgttggagaagaaaattcaaaagcttctattatagtaaaatataagtctttagatgattcaaatggatatcataatgggatttgtactatatattcaaagaagaatagtgaaattaaattaactaaagtgaattttttaaatgaaaataccgttcattttgattctaatgtttcagatattgaagaagatggaaaggttgattttatatcagtagacctaggaggacaatatagtatttacaattatcatggagacttgattggtgataagtcagctgctaatataaattctatatatttgggaagtaaagataaacttatagatattaattacatcgttactcacaaaggtcaaagaagtaattccaatataaatgttaaaggggcacttcaaggaaaagctagaaaggctttcaaaggaactttagattttaaaactggtgcatctaaaagtgttggtgcagaagatgaatattgtatgatcctttcaaaagaagctagagctaaagcaatgccagtgctattatgcgcagaagatgatgtttcaggagaacatgcagcatcttcaggaagaattgatgaaaacaaattattttatttgatgtctagaggattaagttatgatgaagctaagattgtaattgttagagctgcatttaatccaataatagattcaattggtgataatgacgttatagaagaaatattacaagaagtagacaggggacttaaaaatgaataatgtagattttttgaaggatttccctgttttgagggccaaccaaaatggggaaagattagtttatttagatagtggtgctacaactcaaaagcctgttcaagttttagaagctattgaaaactactataaagtaagtaatgcaaatcctcatagaggtgcttataagttaagtattgatgcaacaaaggcttatgatgacgctagagaaaagattagaagattcattgatgcggaattttcaaaagaaataatttttactaaaaatgcaacagaaggctttaatcttatagcatcttcttatggaatgaacaacattaatgaaggtgatgaaattgttatttcaattgcagagcatcattcaaaccttattccatggcagattgtagctagagctaaaaaagcaactttaaaatatatgtacgtaaatgaaaacggagaaattccagaagaagaaattaaagataagattactgaaaggactaaactagttagcataactcatgtttctaatgcacttggaactataaatccagtaaaagagattatagagtatgctcattcaaaaggtgctaaagtaattgtagatggatcacaaagcgtaccacatatgaaagtaagtgtaagagacttagatgcagattttttagtattttcaggacacaaacttttaggcccaatgggaattggcgtagtttacggcaagaaggagcttttggaaagcatgccaccatatatagttggtggagatatgattgaatatgtttatgagcaggaagcaacctttgcagaattgccatctaagtttgaaggtggtactcaaaatgttgaaggtgctgtagggcttgcagcagctattgattatctagaaaatataggcatgaaaagaatagatgaaatagaaatggaacttacaagttatgcacttgaaaaattccaagagctgccttatataaagctatatgggcctaaggatttaagccatagaggtggaataatttcatttgacatagagggagttcatcctcatgatgttgcttcagtttttgattctcatggcgttgcaataagatcaggcaatcattgtgctcagccattaatgagatatatgggtattaatgcaacctgcagagctagtttttatttttataatacaaaagaagatgtagacaaattgattgaagcaacaaagaaaacatatgaaatgtttttgaaatggaggtaatttagatggatttaaatgctatttatacagaacttataatggaacacagcacttctaagcataataagagaaacttagataacccagatattaaggaaaagggtcataatcctagctgtggagatgaaattactttagaacttaaattaaacaatggtgttattgaagatttagctttcactgggcaaggatgtgcaatatctcaagcatctacatcaattatgatagatttgataaagggtaaaaatatcgaagaagcattaaagcttacagaaacttttattggaatgattaaaagagaaattaaagatgatgaagaattatatgcattagaagatgctatggcctttaaaaatatctctaacatgccagcaagagttaaatgtgcagttttagcatggcatactttgaaggaagctttggaaaaataattattattagatagtatagaacctagaccttatttaaaatcaaacgaaatgtaaaatgtgtttattttcagtcaagtaaaaactttaaattcttatacaaatatagaaaaagctagtacctatttttttattaatatgaaagttgcggtatgtgaaaaatataaatttgaacattttaaaagttataatactctcatgtatttccgttggaaacatacgaataagtgagaatattataacttttgtttatttaatctaaaattatactatcatttgaagaacatggaattacttcattgaaaaatacatactatcaaaatcttttagtaatactatagatgaagatagaattaataattaacaatatagaaacaaagagaaaatgaggtaaatacaatgagaaaaatgaaaactatggatggtaatacagctgctgcatatatgtcatatggattttcggaagcagcagtgatttttccgataactccatcatcaccaatggcagaacatgtggatgaatgggttgcacaagggaaaaaaaatatttttgggcaaccgttaaaagttgttgaaatgcagtcagaagcaggagcagctggtgcactgcatggttcgcttcaggcaggtgcattaacaacaacatatacagcatcccaaggattactattaatgattcctaatatgtacaaaatagcaggagaattgctgccatgtgttatacatgtagctgctagagcccttgcaacatcagcactaagtatatttggagatcatcaagatgttatggcggcaaggcaaaccgggtttgcaatgcttgcagaaggatctgttcaagaagtaatggatttaagtggagtggcgcatttagctactataaaatcgcggataccttttatgaatttttttgatggattcaggacatctcatgaaattcaaaagatagaggtaattgaaccagaagaacttgttaaggtactagattataaggcacttgatgaatttagaaaaagagctttaaatccaaatcatcctgttataagaggaactgctcagaatcaagatatttactttcaaatgcgcgaggctgtaaataagtattatgatgatgttccagaaattgttgaacaatatatgaccgagattactaggctcacaggtagatcatatcattgttttgattattatggagcgcatgatgctgatagaattataatttctatgggggcagtaaatgatgttatagaggaaactgtagattttctaaataataataaacaaagagtagggcttgtaaaagtaaggttatataggcctttttcagtggataaactattgaaggctattccaaagactgtaagaaaaattgcagttttagatagaacgaaagaaccagggtcagttggagaaccactttatctagatgtatcaagagcattttttggaatggataatgctccgattgttgttggtggaagatttggacttggatcaaaagatccaacaccagctcatattgctgctgtctatgataacctatttttagatgtaccaaaaaataactttacaattggaataattgatgatgttacaaatacatctttaagaacatttgaacatatagatgccactcctgatggaattacatcatgcaaattctggggcttaggatcagatggtacagttggtgcgaataaaagtgcaattaagattatcggagataatacagatatgtatgctcaaggatactttgattacgattctagaaaatcaggaggacttacagtttcacatttaagatttggtgataagccaattaaatctagatatccaattgatagaccggattttgttgcgtgtcataatcaatcctatgtgtataaatatcatgtaattagagggttaaaaaagaatggtaaatttatattaaatacaatttggactcctgaagaattggatgagagactaccagcatctataaaaaggtatattgctcaaaatcatatagaattttatataataaatgcagttaaaatcgctcaagatgttggccttggaggaagaataaacatgataatgcaagctgcattctttaaaatagcaaacataattccagttgaagatgctattaaatttttaaaagaagcggttgttaaatcatatggtaataaaggcgaaaaaattgttaacatgaatcacgcagcaatagatgcagggttagagggaataactaaaattaaggttccttatagttggaatactgatttagacgataaacttgagcttgacgagaattttccggaattcattaaagaaattactaggccaatgaataggttagagggcgattcaatgccggtgtcccatttcgtaaaagcgggaatacaagatggtacttttatgtctggaacaacgtcttatgaaaagagaggaatagctgtaaatgtgcctgagtggataccagaaaactgcattcaatgtacacaatgttcatatatatgtccacacgctacaattagagcattcttgttaaatgaagatgaaaaagaaaaagctcccgaaagtctaaaagtattagattcaaagggaataaaaggtgatgaaaagttatatttctcaattggtgttactccgcttgattgtactggatgtggtaattgcgcacaagtatgtccggcaccaggtaaagcattagtaatcaaatcacaagatagtcaacacgagcaaattgaagcttggaattactatatggaaagagttaaacctaaaaatccgctaaataaatacactcttaaaggaagccaatttgaaagaccattacttgagtttaatggagcatgtgcaggttgcggtgaaactccatatgcaaggcttgtgacacaattatttggtgatagaatgatgattgcaaatgctacagggtgctcatcaatttgggcagcagggtcatatgaaatggcatatacaattaatgaacatggtcatggaccagcatgggcaaattcattgtttgaagataatgctgagttcggatatggaatgtatttaggtgttaaaacaataagagagagaatagcgaataatgttactattgctcttgaaagcaatatgtcagaggaaactaaaactgtgcttagagagtggttagataataaggatattggagatggaacaagagaaagggcaaaaaggctagttgaagttcttgaaaaagaaaatagtgaaatttctaaagagatattaaaggatagagaatatttcgtaaagaggtcacagtggatatttggaggcgatggctgggcttatgatataggttatggtggtctcgatcaagtgatagcaatgaatgaaaatgtaaatatattagtctttgatacagagatttactcaaatactggtggtcagtcatcaaaatcaactccgacagcagcaattgcaaaatttgccgcatctgggaagaggacgaagaagaaagatttaggaagaatggcaatgacatatggatatgtttatgtagcccaagtttgtatgggagcagataagaatcaaactattaaagctataacagaagcagaagcatatgatggtccttcattgataatagcatattctacatgcattaatcatggaataaaagtaggaatgtcaaatactcaagaggaagaaaagaaagcagttgattgtggatattggcatctttatagatataatccagcattaaagggagaaaagaatccatttatattagattctaaagatccaaaagaagattttaaagacttcttaatgggtgaagtaagatatgcatcccttgctaaagcatttccagaggagtcagaaaaattattcgagaaaacagaatctgaagcgaaggaaaggttagaaatttataaaacattagcaaatcaacaataattttataaaaagtaataaatacaaaaggttgtaatttaaatttaatagaaaataacatactaacttcttaatcagaagttagtatgttattttttttataaatattctttacgaataatttattatatatgtaaatattattaaatataaatagtataaaggagttaagtgtgtataaattaaaagaactgaatattgtacacattaaaatattatatatagaagtcgttcataaggattccgaagagatacatggaggagtttaaatgaaaaaaaatatattgatggaaagaatttttcatgatattaattatgataattatgttgtacagtatcaaggagatattgaagctgagatttctaaaataccagattactatgttacagtaatcaatgatagatatgccgttgtatctgttaaaaaagatgttgaaatcaatatgggaaatgaaccatatatttcatcaattgtatatgttattcctgcagaattttatactttacaagatatttcaccagtagatgcgtctcaagctagctttttacaaaccggatctcaattgaatttaacaggaaaaggtgtaaatgtagcaattatcgattcgggtattgattatcttagcgaagagtttatggatgctaatggggaaacaagaattgaaaatatttgggatcaaacattgataagtaatgccgaaaacggttcggaatctgtaccgtttggggtattatttgatagaaataaaataaatgatgctataagagcaagtagggagggaggatctccagatgatatagttccaagcagagatgaaattggacatgggacgaatatggctggaataattggagctagtggaaagaatccgaatttaaggggtgttgcaccagactgtaattttgtagtagtaaaacttataagagatttctcgtatgaggtccagtttccagatgtaatagttcctgtgtttaatataactgctatttttgcagcattgcaatatgtgtatgaatatgctttaactactaacaaaccaatggttatatattttccccttggaagtagtttgggaaatcataagggagaagggatactggaagattttatagacgcaatatcaagcaatggaggaatagcggtagttactggtactggaaatcagagagatgctggcggtcacacatctggttcagtaactcagattgttggagcgcaatcacctggtgctggggttgcggagttagaagcgtcacctgaacaaaaaaatatatgggtgcaaatatgggctgatttgcctaacataatgacggttgaaatagtttcaccatcaggggaaagttctgggatattgagtttaataattaattacaccataaatcatacttttatttttgagaagacttcaattagagttaatttttattttccagaagaagtaaccggagatgaattgataaggataagattttataatttgcagcctggtatatggagaatcagaatacaggcaaattatattgctaatggaagatttaatgcttggataccacaaaaagggctaacagttggagacacaagatttagtttctcagatccatttggaactataacaaatccaggaaattcaatatatgctataactgtagcggcatataatcaaaataataacaatattgttgatttttctggtatggcctttttggaatccttcactgatagaatagatgttgcagcggggggaataaatgcactaacagttgccccgaataacacaacagcagtagtaagtggaactagcgtatcagcggccgttgtatccggagtttgtgctatgctatttcaatgggggattgtaaatggaaatgaacctaatatgtatgcacaaactattaaagcatatcttgcaaaaggagcaatggcgagaagtggagatattactccaaatccatattggggttatggcatattgaatgtaccaaggatttttgaaaatatgacatagagaaagagtaattaaagcaatattttaattatttttttagagacttattcttaattgagtaagtcttttattttattaaagaaaaatattgttattctttagtagattagtggcaatttatataagaaaagctaacaatatgtataaataagtattaaatgtaatcgattaatgttataattagttaaggaataatgtcaagttaaggagatgaggaatatgaataggacttatgttggaaaatatttagatgaatgtttaaataatgcttcaaaagaattaaatgttgcagaggaagacctaaactataaaataattaaggacaatcattcatttatcaataaaaaagttgaaatagaagttatggatgttgatttatattcctcaagtgctaataatcatctaaattatacggaatatttaacgaaagatgttgctaagaaaagctttgtaattaatgaggataatataattgccaatgatgaaaatggagttaaagtagaaaatggtaatgtagtagtaatagaaggtttaagcaaagtagataaagaacagataacaattagaccttgtgagaaaatcaaactttttattaatggagaactatgtagtgaaaaaggaccatatgagataactcaatctgataagatagattatataggggagaaaatagaacaagtaaagaaaatatcagtgaacatttcagtggataaaatgaagggatatataaaggtagaatataaaccagcatacgtatataaacttagggataagccaatggctaaagatttgattcttaaggcgatgaaggtagaggaagattatcctaaaaaatatacattaacagaaataaaggaaatattaaggcaaaacaagataactgatggaataatatataaaaatcttatagaagcatgcgcattaggaaatggagaagagatgttaatagctgaaggtattggtgctattgatgacacgccaaatgaaattaaagtgttatttgatattggagaaaagaggatagtgaatgaaaactcaaatgaaaagatagattataggaatgtatattctatatctagtataactgaaggacaagttttggcagaaataattccaggtaaaaatgggcaagatggtaaaaatatatgtggtgaagtattaaagaaaaaaactgtaaaaagtagacctataaaaataggcgatggatgtaaagttgaaggaaatagtataattgccactaaaactggcagaccatcatctaaaaatggaattttgagtgtaaatagtttatataatattcaagatgtagatataaaatcagggaatatattttttgctggaggcgtccatattaaaggaaatgttaaagagggaatgaaagttaaatcgggaaattctttaactattgaaaaaaatgttgacatatctaccatagtagcaggaggagaaattaatattaaaggaagcgtgattaaatcaactgttcttactggacaagtagatatggaaaagaaaatgtatttggaaaagttaaatgaatataaagatattatatcaaaacttgtaagtgcggttgaaaagttaaatgagtctagcaataactctaaaaagatttctgaattggttaaaattcttatagaaaacaggtataaatctatacctaaattgtctttaaatataataactcatagtatttgtgaagatagtgataataatgatttagtaagttttataagaagtaaaatgatgggattaaacttatcaaaaatagaatcaatagatgatttaagaaatcttgaagagttaataaacaatgaaatagaaatgttagaagataatatgataatttcagcagacatatatataggatattgtcaggattctttaataaaatctacaggaaatattattataacagataaaggacaatatgtttctaatttaacagcattaaatgatattatctttttacgtgatgattcagtggcaagaggaggagttatatcagcaagaggaaatattaaacttggaatagttggcagtccttcaggggtaacaacaagattagaggtattacaaggaggaattataactgcaaaaattgcatatagtaatacagttttttgctttggaggaagaataaagacattagacgtctcaagtaaagatattaaggcatatgtaaataaagaaggagaaataataattgataagtttgtactgtaagtaataatagattttctcatgtatgttgatagaatttcaaatttttactttgattatttaggtgaacatttattcagctaaaacatattataatataaaatgaattttgttctctaaagtttggaggaaaaatatgagatatgaaaaaattgaattaacgtattcgtataattcactagaaccatacattgatgaagaaactgtaaaaatacactatactaaacatcttcaaggatatgttgataaactaaataatgttcttaagggatatgagaaatttacagagggaaaaactttagagcaaataatttcaaatcccaataaaatacctaaaaaaatttatcgagatgttataaatcaaggtggaggtgtattaaatcacaatttatatttttcaattcttttcccttatcctaaaaaggaacctgaagggaaattacttaacgaaatagttagcacttttggttcattagaaatgttaaagaagcttgttagcgaagctgcaataaataaatttggatcaggctatggctggctagttaaagataaacatggcaagttgaaagttgcaaatagttcaaatcaggatacgcctctaagtttcggatttactccaatactgacaatagacgtttgggagcattcgtattatctgaaatataaaaatttacgtggagactatgttaaaaacatatggaatttaattgactgggcgcgagttgaggaattgtataagaaggataatttggtttgattttaatttcagtcaataaagagggctttactttagttaaagttctcttttatatatgtagtaaaataaaatcaagatggtatatagtaaattattatacacaattcataaaataagaattataataaaggaaaatttaaaattaattttggggtaaggagaatacatatggcggaattaaaaaaaatatcaggaccaagattaaagagtatattagaagaaaatataaacattaaagagaaactcataaatgaaaaatatttaacaaatactttagttaggaatagttgtctagaatatatgaatgaagaaagggtagagattagcgcatgcaagttcgaaaatgttgtgtttagggagtgttgtttaagaaatgtagacttagtagatataatatttgaaaattgtgatttatcaaatattgatttttcaaatggaagtatacatagagtagaatttaataattgcaagcttttaggatctgattttagtgatagtagtatacaagaggttcttttcaaagatacagttagcagatactcaaactttggatattcaaaggtcaagaatgtaaaatttcaggaatgtgatatgcaaagtagtatgtttttggaatgtagctttacgtatgttgcatttaatggatgtgatttagctaactctgagtttactaatactcctcttaaaaaagtagattttagagaaaataatatatcggacatatcgttaactggaaaagagctaaaagatgctattgtatctcctatgcaggcagttgagctagcaagatttcttggtgtaatagttaaataagtattatttccgttaaagtaaaattgtctataggtgatttatttttcgactttaaagattagattttttaaaagttagggtattagtttcgaaatgttttggaaatattgataaacgtatagagagtgatataatgattgtaatgtaaaattaatttaggaggaacaataagtggaaaagatagcattaattactgatagtgcatcggatataagcatcgagttattagaagcaaaccaaataaggcttttgccatttaaaattatatatgcagataaggaatatgaggatagaattgatataactccccaatttatgtatgaaagattaaaaacagaaattcctaaaacatcgttaccgagtattgaaaaaataacaagcgttctgaaagatgttgttagtgagggttttacgcatgcaataataataactatttcatctgcattttcaggaacatataatgcagtaagactaatttgtgaggagttcaaggagctgaaaacttttgtttttgattctagaacattaacaatggcagaaggtgcaatggttttggaaacttcaaggttaattagagaaggtaaaacatttaatgaaataattgaaattctacctacatacagagagaagatagatttattttttacaatagatactttagaatatcttcaaaaaggaggaaggattggcaaagtggcaggaacaataggggagtttttgaatcttaagccaataataactgtagcagaagatggaacatatagaactgcggctaaagttagaggttcaaagcaagctgtatctaaattaaccagtatatttaaaatgtatttagaaaaaggtaaatataaagcctggattttagatggaaatggttttgataaggtacaaaacctatactgtttgataaaagatttacccaatgtagttgagtgtacaatagctggaacaattggtccagcgcttggggtaaatacaggaccaggacttgtaggactcgcaattgagagaatagatgaataagaggtattataaataaacttctagtaagttaagtgaaattaaatttctaacttgctagaagtttaattttttgcatataaatattttttaatatataggaaaaactaatttttataaaaataaagaaaaacaggaggaattaaaatgaattttccaacatcttttccaaaacaagaacaaaaagaacaaccaggactggagtatgaaatgaatccagctccaatatatgatgatccaagttataataaaaaaggagatatattaaaggacaagattgcagtaattactggaggcgatagtggaatcggaaaggctgttgctatagcatatgcaaatcaaggtgctgacatagtgattgcttattataatgaaaataaagatgcagaagaaacaaaaaaaataatagataatataggcagaagatgtaccttaattaaaggtgatataagtgatcctaatttttgtaataatgttttagaaaaaactattaaagaatatggaaaaatagatatattagttaataatgcagcagttcaatatgaaagtgcagatttcaagcaaataagtgacgagcaatttgataagacatttaagacaaacgtatatggaacattttatatgacaagggcagcattaaatcatttgaaagcaggtggatgcataataaatactgcttcaataactgcatataagggaaatgaaacattaattgattattcaatgactaaaggtgctatagttacattaacaagatctttatctactgcattagcaaaaggaaaaactaatataagagtaaatgctgttgcacctgggccaatctggacaccattaatcccagcaagctttgatgaaaaaaaggttgagaaatttggatcggatacaccattgggaagagcaggacagccagtagagtgtgctggagcatacgtatttttagcttcacaatgtgcttcatatatcacagggcaagtaatccatgttaatggtggagaaatagtaaatgcgtagataaacaaatatttgtataatgtttttgaagaacaattttacataaattatattaagagatttatatgggaagcttacttttaaagctgcgaaactagtagtaaaatttattatatgatttacatagattaaaattatactttgtaacatcataaaatgttgattagaaaatctagagtcaggaataaaatcttggctcttttgatttaagcgatatttctatagaaagtaaaatatattaatgagaaatgctaaaagaataatactagcatttatgtttgcggaaacattagattaaaatatactatttatcaacataagacagtagctagagttatggcatcaaatagatatgtatatatgtgatggcggtttaaaaggcaaattaaaataaaaaatcttgactacacatagatgaatatctatactatatacatagattagtaaaatggctaatattgaaaaaggagttaaatgtgtgtaagaaatatgataagaatggaagaattttaaaggcactttcagatcctaataggctaaaaataatagacttattatcttgtggagaaaaatgtgcgtgtgagatattagagagctttgaatttacacagcctactttatcgcatcatatgaaggtattaatagattgtgggttggttaaagcaagaaaagatggaatttggaacttgtacaagttaaacacaagtaattgtaacagattagtgttgtttttacttaatctaattacagaaaatgaggattgcgtacaaattgataagaaaaatgaagattctaattaaaagttaatatgaaagtacgattttgttaatctttataatatactaaatataatgtacttattaaaaataataaaaatttataaaaacggagatgaaatgagacagattgatttaactaaaggaaaaacattgaatgttctaacaacattatcagtaccaataatgggaagttcattgctacaatttacatataatctggttgatatgctgtgggttggcggacttggaagtaatgctgtagcgagtgttggatcagcgagttttttcgtaggccttggatattctataaactcattagtagttataggaacaggaataaaagtcgcacattctataggtaaaaaagaagagaatgaggtaaaagagtatattaatgcgggccttttaattaatgcagtgatgtcgtttatttttgggtctatacttattatattaggaagagcacttgtgaattttttaaatataaataatattgcagttgaaaaagatgcatatgaatttttagtttccagtggacctacaataatttttgcattttttaatcttttatatgcaaggatattggggagctttggaaataataaattagcatttaacataaatgttgtaggagtagttgcaaatataatattagacccaatttttatttatgctgtaaaactaggagttgaaggagcagcaattgcaacaatgattgctaatattataatgtttttgttatatttatttagatcatcgggaacacttaggtataattttagtgtaaaaattgattataataagataaaggaaataataattttaggatttcctatggctatacaaagaattctatttactgtaataaacatattccttgcaaaaataatagccatatttggatcagatgcaatagctgcccaaaaaataggacttcaaattgaatctattacatatatggttattggtggtcttcatggtgcgatagctgcatttacaggtcaaaattttggggctaaaaaatataaaagaatcaaagaagggtataacactgcacttaggataggaattgtatattctcttcttatggcatttatattcatgttttttagtacaccatttgttaaattatttgttaaagatcagcgaacaattgcaatagctaatatgtacttacaagtagtagcattttctcaattatttagtactacagaaactgtatctaatggattatttacaggtataggaaaacctaaaatatcttcaattataagcgttgtatttacagcactacgaataccaatggccttagctttaataaaaccatttggtttaaatggcatttggataagtatttctatatcgagtattctaaaaggaagtgtagcttatatattatatataattgaggtgaaaagaaaatataaataggaattaataaaatatatagataaaatttatatggggaggcagtcaatgttaaatgaacttaaagaattatttacaccttttgaattattaaaaggtaattatggtatagaaagagaaagtttaagagtaaataataaaggggagttatcagttaaaaggcatccagcagtgtttggtgagaaagtggaaaacaaatatataactacggattttgctgaaagtcaaatagaagttataacaccaccatttaaaaatatagaagaaacatataatttttctagagtgctatatgatattgctgcaatggaaattgaggatgaatatttatggccacagtctatgccgggaatagtacctaccgatgataaaattagaattgcagaatatggtgataatgaaaaaggtagagaagctagacgttacagagaaaatttaatgaaaaaatatggaggtaaaaaacagcttatatgcggtatccattataatttttcctttgatgatgatttcttgagaaagttatactgtttatatgaaagacagaacactcataagatttttagcggaatatttaatgaaaatcagaaattgggatacaaggagtttaaaaataacttatacttaaaggttacaagaaattacttgaggtataggtggattattatatatcttttaggagcaagtggagttgttgacaaaagctatatgggaccttgtatgaattcatctaaagaaattgcacatgatagtttttcaaatgaaggggctttgtcttatagaaatagtgaatgtgggtataagaataaaatagatctatatcctaattataattctgttgatgagcatattgaaagtttaaggagctttgtaagcgataagcttataggaagtcataaagaattatatagctgtgtaaggcttaaaccaaaagatccaagtgatttctttaattcacttagtaaagatggaatccaatatctagaatatagaagtattgatattaatccttttgaaaaaggaggaataagcttagatgatctttattttcttcaaatatttaatttgtttttactaattaatgaagaaactgactatgatagatggcaggaagagggaacagaaaaccaaaatataatttcaaaactaggacaaaaagatgttttattaaagaaagatggagagcttatttccaaggagcattggggagtagaaatattaaataatataagagatattaatgataaattgaatcttggcaaagaaagaattattgacttgatgatcgaaaaaattaagaataatcaactaacatatgcttacaaaattgaaaaaaaagtaaaagaagaaggatatatcaatgctcatttagatatagcacagaaatataaagaagattcttataaaaacagatttaaattggaaggatatgaagaattagagctatctactcaaatattaatgaaagaagccattaaaagaggagtagaagttgaagttttggataaatccgaaaatttcatatcacttagaaagaataataaagtagaatatattaagcaggcaactaaaacatcaaaagatagctatataactgctttaattatggaaaataagagcgtgactaaaagagttctttctgatagtggtattaaagttccaaaaggaattgaggtaaattcaataaatgagtcttttaatataataaaagaatttactaaaaagccagttgttattaaaccaaaatcaacaaattttgggataggtataagtatatttaaagaaggcgctgatgaagagagtattaaaaaggcttttgaactcgcatttaaatatgataatacagttctcatagaagaatttgttaagggaaaagaatatcgttttttagttatagacggtaaagttgcaggaatacttcatagagttcctgctaatgttaaaggggatggagtcagttctattaaggaactagtggaaataaagaatcaggatccgttaagaggtcatcactatgtaacaccacttgaaaagataattttagatgaaagtgcagaattatttttaaagcaacaaaataaagattttaattatatccctgaagaagacgaaattgtttatctaagagagaattcaaacataagtactggaggagatagtatagattatactgatagtattcctgaaaagtttaaaataatagctgtaaatgcagcggatgctgtaaacgcaagaatttgtggagttgacatgatgcttgaaaattttaacgacgaaaattctaattactcaataatcgaactaaattttaatcctgcaattcatattcattgctatccttataaaggtacggaaagagaaattggtgtagaaatattaagggtattaaacttcgtttaaaatatataactataaaaataagggaagctctcaaaagagctccctttaatataattagctataattatagagattcaacagctaaagctgataatactgcattagttatagttaatccagctgttacagaaattaagctagttggctcaagttgtactgtataagttgtgttatcataagctggattgcaatcacaaaattgaaaactaaatgattcagattctaagacactaactgtttctgcaaaagtaaatgttccacctattggttgaggagatccatcaccaactgtttttattagtgtgaaatttaaatttactaaaatatctacaggtaaagaaattatgctagtaaatgttaaaagcactttaggattacacatattagtagtatctagagaaacactagctacaggtataggtctagataatggtgttgaaattataggcaatggtccaactccaccagaaccaacatttagtaaagctctaccaggctctggagcacgattgtagcatctgcaactaggacgattgtcagaatagctaggacgagtgtcagaataattgcagctaggacgagtatcgtagcaatcataatcatgttcattttcacaaataatattcataaattacctccatactatcataagtttatcaagtttttctccgtataatttagttgtaagagattctttttatattatattgtatgagaaatgtataaaaatgtgatgtattagaaaatctaatattttataaatttttatgagtataataattaaatgcaaaggtatttatattttaggaatatacaaatttaactaataatttaaaagatgaggtgcgactcaatgataaagaatgattatatgaaagagatagagaatactttaacattaacaaatgaagaagtaagaaaggatatagtaaatggtgatataggagaagctaaagaaaaaataaacaaaaaacttaaggctatcgtaggaatcgatataggaactatagacatattttctttcagtagcatagaaagttttataggtaaagaaacgcattataatgcagaaaaatttatagcatttggaagtcttatgaaacttcaaggactaattggtgataaggaaaataatgaaagtgccaaaattcaatattatgaaaaatcattagaaggtttttataaggcttatactgaagatgatgagataaatgagaaatatctttatgaagcagcagaagtagcggatgaattaattaattatgaactttccttggatttagacaagaaaatttttagaatatatgaattgaccaataggtttgatagagcagaggataccttattttatattcttagaaagactgataatgatggtagcattattttagaaggaattaaattttacaatagacttaaagaaaaagattacgatgaattagcggaaggtaatcttcctatagaggaagttgaagatggaatcttggagcttgaaagaagacttggtttgtaaacttttgttaaatataaatagataaattcagtaagtataaattacttgttgtttgtattataggaacattgctaaaaataaataatataatgataaaaagcaattataatctagaggaagctatggaatttaaaggatggaataattttgagaatctagcgagagcatgtggatatagtagttgcggtaagaatgacaatggagataacatagaggatgagtttgaaaattcagaatgtagagatattccaaacggatttcaagatgtagatccacagctatttattctaataggagagatattgggaaatatattatcaggaaggcttccgttcaatgttcaaaatgctttaggaaattggctgcaattagttggccaagtaatagagacatataatgctcagcagcaatacttccaaggaggaccaggaagatactttgatcctaaaaattataatgtaagtaatccgttttgtagcagttcgcaaaatactaattcaagcaaaaacaaacccaataaacaaacaaacgatattaagaaaaaaaaatcagaagaggacatggatagtaagataaacaatttggaattatccttaaatgatttaagagaagaaataaaagagattaaaaaattactagaaaaataatccagttaatttatttttctagtaatttttctttaactttttttaaatttgttacctgttttgttatagtagatacaaatattacccctaatgctaatgttccagcactagctaatgtatttaaccctaattctactgcacggcttatattgccacttattgtttcgtacattgtatagtacattccagaaccaggaactagtggaataagtgcacaaattaccaaagttgttacaggggtttttaaaagccttgcacaaatttctgaatatatgctaaatagtattgaggatataaacaatgataagatatcacctatataattttcttttaaataaagataagaaaaccaacttatagcaccacctatagatgcaaatattaaattctttccttttatattaaaaattattccaaagcctaaggatgctaaaaatgagactgcaatttgtgttagcataaaacctcctaaatattgtaatgaaaaatgaaatatattctattagcttattattttggttagaattaacctaagttatttataaacaggcttaaaactgcaccagtgccaacagctatagaaaccgcaactaaaaatgcttcagaggcttttgttataccagataaaaagtcaccagctatagtatctctaattgcattagtaattgtgagcccaggaacaagaagcataatagaacctataatagttttatctaaattattagataaatttaattttatgaacgctatagctaaaaatgcacacaatcctccacttaaggaattagtgaaaaattcgtttatatttaatttttggcatatcacaacaatgatttttattactgcaccaattatgcttgcagaaataaagtctttaagatttccaccaaacataatactaaagcatcctgcactaagagcagaccataataaagtggttaagttagagtacctatgactattagatatgcttgtaagttctttattaaattcatttatatcaatagtttctgtttgtatttttctagaaagatcattgactaaatctactttatgtaaatcaacacccctggaaataattctttgaacaagggtagcaacctcatcatagtaagtgactgttacaattatccctgtaggtattacaaaactatcaactgtatgagcaccaaaggcagtacatattctactaatggtttcttcgactctataagtttcagcaccactttctagcattatttttccagccaatgtagatactttgagtaatttatttaagtccataattttttctccaatatattttttataacaaatgaattatagcacataataaataattcttataggagtaagttatataatatttaataatgaaagattatatgttatcagaggataaaatcattggaagttaagcatattaatatagtagactgaatctataagataatataaaatataacaaattctactaaaggcaatataaaaatataaaaaatagttgataaatttagtaagaaaacatataatttgaatataagtgaaactcttgtacatattttatactatgttaaagtggtttctcgtgcccgttagggaacaaaaatatattggggtgatttattaagatgaattttgaaaatatacaaagagaagataaagaaatttatgatttaattgaaaaagagctagttagacaacaaaaaggaatagaattaatagcttcagaaaatattgtaagtccagctgttatggaagctatgggctcttatttaactaataaatatgctgagggatatccaaataaaagatattatggaggatgtcacgttgtagatgaaatagaacaaattgcaattgatagagctaaggaattatttggggcagagcatgctaatgttcaacctcattcaggttcacaagcgaatatggctgtatattttgcagtattagaaccaggagatactgtattgggtatggatttgagccatggtggacatttaactcatggttctccagttaacttttcaggaaaattgtttaactttgtatcttatggagttgataaagaaactgagatgattgactatgaaaatgtaagaaagctagctattgaaaataagccaaagcttatagttgctggtgcaagcgcatatgcaagaattttagattttccaaagtttagagaaatagctgatgaagttggtgcattactaatggtagatatggctcatattgcaggacttgttgctgcaggtgttcatccatcaccagtgccatattctgattttgtaacaacaacaactcataagactttaagaggtccaagaggtgggttaatactttgtaaagagaaatatgctcaaatattaaataaaaacatatttcctggaatacaaggaggtcctttagagcatattatagctgctaaggctgtttgttttaaagaagcattagatccaagttttaaaacatatggagaaaatgtagttgaaaactgtaaagaacttgcagaacaattaatagctagaggttttaaaattgtatcaggtggaacagataaccatgtattcttagttgatttaaataacaaagacataacaggaaaagaagcggaggctttattagattccgttggaataactgttaataaaaacacagtacctaatgaaacaagaagtccatttgtaacttcaggaatcagaattggtacagcagcgataacaactagaggttttgtaaaggatgatatggctgaaattgcagcggttatatcagaggcaatagagaatagagatggagatttatcggctcttaaaactagaatagaaactttatgcgataaacatccactatacaattaagtaataaggacatagtgaggcttcatttatatgaagcctcttgttatatttatctagaattctaaagagtaaatagaaattattatttttattgtcgctattatttatacttaaataagtaattaaatacttaagataataataaaataaagtgaggtttagaatttacataagagattttgaaaatataatatgatttatgtggaagatgaggagatagatgaaaaaagcacttttaattattgatgctcaagaagattttattggtgaacagcgtaataaagagagatttaattttgaagatgtagataatcttattaataatataaataagaaaattatattttatcagagaaataaagatatagtaatttatattgctagtgtacttcctaataattttttttataagaagttttttggatacggtcttgtaggaactaaaggggccaaattggataagaggattaagatagtatcgcaaaattattttgaaaaacaatttgcaagtgcttttagaaatagtaatttagtgaaattcatgaaaaagaatgaagtgagtaaaatagagttggttggagttgataataatgaatgtatttttaagactgcaagaagtgcggttaagattggacttaatgttatcatccccagcaatagcataggaattattaataatgaaaaatatcgtagaataacgaacaaattaaagtcaattggagtagcttatatatgaaaaaaactaataaaattaagattaagtttttataaatattttatttaaaaatttctcatgaacatttaaagtatttcagaataatatatattatgaagaaagaaggttttatgggaggaaaaattaatgaatccttatcaattaatcatgaatgttcaacaaagaatgcaacaagatcctgactttgctaataaatttaataaagctgtatctgaattaaacaaggtgccaggacttcagcaaagagttattcaaatagctcaaattagtgatgaaagtcaaagggaacaagctatggaaagattacctaaagatgcaaagcatgcggtaaaaagaatcttaggattattagatgagtataatatttataaatgatttaaattagaattatatattttcaagtacttattgaataaaagaagtttcttatagttgtaaggatttaactatatgaaacttcttctattttagattaaaaagcataatagatttttaggggaaatttattattaatatgttaatttggctcggaaattaaaatcctcttttttcagcttcaataccactttcatttcttccaggcttttttattgttgtattgtaactacttttcgcatattgattttgagttttgttaccatttcttaaaaaattactttctgaataatctttattattattattgtccacaaaatcatctcctttaatttattatatatatagtatgtctacattaagaaaaattaattgtggtaaatttagtatagatattataaaaaataatattctattttataatccttttgcaagaaaatattacaaaatagaaattaatacaaataaaacaccccaaaaaaataaatgcatggagaatgttataaatgagcaaattagaagtctctgccttgtatttaaagatggctctatacttactcttataagaaaataaaaacctgctaaagtaaaaagtgcagaacatagactatcgtaagagagtacaaagataagtaaaattaagcctaaaaatataaaattccagccaggcatgtattttacttggacatatttttctcctgaatctaagtatgtaccattaatagcaatatcacaattattatctatacttaccagaatggcggttttacttcctaatttaaatgtagtctcgcgtgtaactccaaaagttttagagctttgaagttttacaggaatgttatttactagtaggctctttcttaaaaaatttttagaatattctataatataatttatattatctacattggcaatccatctttgagttcccataaaaacctcctttattaatgaacattaaagttagtattatataaatttataataaaattaagttagtatatttaaatatatacataaatatgtttgaatagaattgagtttgtactttaaaacaaattataagctaaataattaactaattatttgacaaagattatgtagatatgagttatatttatatgatagcagtacagtgaaaatggtcattaagaatctatgatagtagggttaatcataaattcaagttaattattgaaaaataatggtgggtgtaaagaattagtgattttaaaaatgactaagctgagaatagttgattcaaaataataggattatcaagaaaaacgttgtataatggtaaagtaattaaaaatcatactgataatcatatactagaataattaaataaacgataagacgtcttaaaatttgtaaaataaatatgattaatttgagaaatatatattttactaaaataaaattaagtatagaaaataaacaatgataagaaataaatttttattattgaattttttatcgacaaggagaaaaaatgagtaaaacattagtattagcagaaaaaccatcagtggggagagatttggcaaaagttcttaagtgtaaccaaaataaaggttcatatatagaaggtagtaaatatatagtgacttgggcaatggggcatttagttgggcttatggatcctgaaggatatgataataaatataaagagtggaaaatggaaacactcccaatgcttcctaaacatatgaaacttacggtgttaaaaaaaacagggagacaatataatgaagtaaaaaaacaattattgagaaatgatgttagcgatattgtaattgctacagatgctggaagagaaggtgaattagttgctaggtggattttggagaaatcaggggtgaaaaagccgcttaaaagattatggatctcatctcaaacagaaaaagcaatcttagatggatttagaaatttaaaaccaggtgcagcttatgaaaatctttataaagcagcagtatgtagagcagaagctgattggcttgtaggacttaatgtgacaagagctttgacatgtaaatataatgcacaattatcggcaggaagagttcaatctccaacattatctatgattgtgttaagagaagatgaaataagaaattttaaaccaaaaacttattatactttggaaggaaaaactaggggatttaacttagcatgggtaaataaagacaataattcgagaatatttgatgaagaatttgctaataaggtagcttcaaaactaaaaaattcagaggggaaaatagtaaatataaatgaagccaataagaaaaagttttctccagctctttatgatttaacagaacttcaaagagatgcaaataaaatatggggatattctgcaaaacagacattaaacataatgcagaggctttatgaaaattataaaatattaacttatccaagaacagattcaagatatattactactgatattgtggctactattcctgatagattaaaagcaatttctatcggagaatatagaattgtagcagaagaactacttaaaggaaaaataattggcaataagagtttcgtagataattcaaaagtaagtgatcaccatgctattattccaacagaacaaaagcctaatttagcacttttatcatctgaagaaagaaaaatttatgatttagtggttaaaagatttttaagcgttatgcttccaccctttgaatatattcaaactacaatagaggcagaggttcagggggaaaagcttgtagctaaaggaaaagttattaaagctaaaggatggaaaaagctttatgatagattagaagaagatagtgatgaagaagaaataaaagagcaagttcttcctacagtgtctattgggaacagtattagagtagagagtgttaatataaagaaaggtgaaacaaaaccaccagctagatttacagaagctacccttttatcagcgatggaaagtcctcataaatatattaatgtttccaaggaagctgctaaaactttaggtgaaacaggtgggcttggtacagttgctacaagagcagatattattgaaaaattatttaattcatttgttatagaaaaaaagggcaaggaaataattcctacgtcaaaaggaaagcaattaatggaacttgtgccaaaggatttaaaatcaccacttttaacggctaaatgggaaagccaattagatgaaatatcaaaaggaaaaagagatgatcattcatttataaaagaaatgaaaaactattcagttgctttagtggaagatgttaaaggtacaaataataagtttgttcatgataataaaactggaaagaagtgtcctaattgtggcaagtatctattagaggttaaaggtaaaaatggagtaatgaatgtctgccaagatagagaatgtggatatagggaaagtgtagctagagtgacaaatgctagatgtccagagtgcaagaagaaattggaactaagaggaaatggtgagggagcaatatacgtatgccctggcagtaactgcaattttagagaaaaagcctctcaatttaagaagagatttgagaaaaatggaaagattgataaaagagaagtgaataattatatgaagaaaatgaagaaagaagcagaagaatttgacgataatccttttgctgcattattaggtgatataaaatttgataaatagtaaaaaacttctagtagcttaaagttactagaagttttttattaaatatatttataccctttatttcggtagttatgcataagttaaaaatattgtcatattgttaagaaaaatagaattacttgttatattatttcttcttatggtaacactaattttgaaaggaggcagtaactatgaaaaataatgcaaaaagaattatatcttttactttgatatttatttttactttattacttttaccaattaacttagccaaagctgtagatacggatgaaaaagtaaaatcagatggaactaatattgaagcaagatcagctttattaatggaaccaatgagcggtaaaatactttatgaaaagaatgcagatgaaaaatttgcaccagcatctgtaacaaaaattatgactatgttgataacaatggagggcgtagatagcggaaaaattaaattagatgataaagtaacttgtagtgaaaatgctaagaaaatgggcggaagtacaatgcttttagacactggagaaataagaactgttgaagaacttttgaaaggtgtagcgatagcttctggaaatgatgcagccgttgcacttgcagaatatcttggaggtacagagcaagaatttgttaatatgatgaacaaaagagcgcaagaacttggaatggttaatacgacattcaagaattgtaatggattgccagcagatggacatatgtctactgcaaaagatatagcaataatgtcaaaagagttattgaaacatccaaaggttttaaaatacacaggaacttatatggataatatatcagaaggaagaaaatctccaatagaactagtaaaccacaataaattagttaggttttttgaaggttgtgatggattaaaaactggatttacggatgaagctaaatactgcattagcgctacagcaacaagaaatggagtaagaatgctatctgtaataatgggagccccaacttataaaataagaaatcgtgatgcgggtgttttacttaattatggattttcaaagtatgaagggaaaaagcttgtatctaaagatgaagaaatagataaagtatatatggatgaacaaacagataagttctttatggcaatggctaaagatgacttaaatgttatacttcctaagggagacaataaggatttagagaaaaaaattgttatagatgagctaagaaaagaatacaaagcaggagatatagttggaaaatgtgaagtttatttgggtagcgaaaaagtaggagaggtagatatatattgcgatagagatgtcaagaaaggcaatataattgacaatataaaatataatattaaaaacttattcgaaaaaggtgtatagcccgataaaaaacattatgaattttatatttttcttgtaaaactataaataagaaataattcaagcatagctaaacaataaatttaattaaatttatttagctatgcttgttttatatttttataatatacatatttttaattagctcttatatattgttcttaagtgaaacatttaacttaagaaaatttcaaatgtaaatttgttattcaaaatatatatattgcaaaaataattcttcattataattctaaaaatattgcaagaattttagccgtaattgtgaattgcaacatatatattaatgattcttgttttagatgttataacttgttattatatattatagtacttattatttagatttaaagttataatttaagtataattcataatggaggtaaaaaagatatatatggaacttccaaagattaaaattaatgattttgaaggcccgtttgatcttctattgcatttaataagaaagaatcaaatgagtatatataatgtaaaaatatatgaaataactaatcagtatctgaattatattaatgaaatgaaaaagatggatttagaaataacttctgagtttattgtagtagcggctaccttaatagaaattaaatctaagaatttgttgccgaagcttaaaaaacaagaagatgatgaagaagatgatgagaaaaagcttttagaaaaacttattctttataagaaaataaaaggggtttcagtatttttaaaagacagatatactagtgctggcgagatatatggaaagaaaccagaggtaatagaagaaaaaagagatgatactgataaaaaagatttattaaaaaatataagtcttatagaattgtttaatatatataataatttacttgagatatataataataagcaaaatagaaataacataattcagaaaaaaatatatgtggataaatataaaatagaagataagttagaatatattatggacaagttaaaaacagagaaggtaagcagctttcacaagattatcgaaaattgtgaatgcaaattagagtgtgttgtgacatttttggcattgttagagatgattaaacagaggatgatcaaagtatatcaaagcgaaaattttagcaatatattgattgaaaggagaacagatgatgagtaatgataaagggattcaaattccatttatagatgacaagaaaaaaaattctttaaaatcagcaatagaatctttactatttgctagtggtgaaccattaagtttacaggatttggttaaccatcttgaagaaaaaaataaacttattgaaattatcatacatgaaatgatggaagaatatgaaaatgatgatagaggaataaaaataatatgtattaaaggaagttaccagttagttacgaaagctgaaaactctgattatatacagaagcttttgaagaaaaacaaaagacaatctttatcacaagcatctatagagagtttagccataattgcttataagcagcctataacaagaattgatattgatgaaattagaggagttaaatcagagagtgctctccaaaggcttttagaaaaagatcttataaaagaggttggcagactagaagtgcctggtagaccaatcttatatggaacaacagatgaatttttaagacaatttgaattgaaagatttaaaagaacttccttctctagatttatttgggcaagaagatgttcaggaagatcatggacaggaataaaatttaaggatatatcatcggaatttataaatatattaatacttgaaattttgaaaaacaataaaatctatttttagatattctatatttattttattaaatttaagagagaaatagtgtattattaaataactatttctctcttgaattaaaaattaggagcaatttaaatattatcgctatcactgcaataacattcttcggaattattatcaacagtagtagtattgacagtagcagattttttattctttccacatatatcttttactaaactttttgcaatatctaagatttgaggaactgtatccacaattctatcatatgtagtatcttgatctacaggtagcattctaacaccatcttgtttaacaactaggaatgctacaggtttaacagaaacccctgctccggagccgcctccaaaaggaaatgttgtgcttgtgatattttgctttaaatttagacattcacttccaccagaagcaaatccaaagcttaatcttgaaacaggaacgatataagctccatcttttgtttctatggctttccctattactgtgtttacatcaatcatatccttaagattttccatggtacttttcattaagttttctacatgttgttcacttgacataataaatcccctttattaaggggtcacctcccttgtttatcgttattttttaataaattaattattatatatataatgtttgcaagtgataagaaaattatacttgaagtttcaatttttagtaaaaaattatcatcaaatacaggagttattttaaaattaaatttctttatattaaaaaggtaattaaggagaatgtaagttaatgatgttgtattatatatgactccatagaaaattgcagttctcgcagcatcgtttagtgagtattccatagataaattcatttttaacagtggcttatattttaaattatttaaagtagaaatcagatgcttgaaatttattttactattaatttttgaaaaaaatttatgcttacttttaattaaaggtgaatttttgagtttttttatacgtgttattcttttcttatttttagagataagattaaatccatataattttatataataatctacggtagaatagtaaatactaaatttaatgggaataggaataaaaaatattaataagaccactaaaaagacataaaataatttcataaaattcctccaaactacatctactccataattattgactaataataaaaaaataaacctagaaaattatcaaaattaggtttaaaaattaattttaaaggtaaactagaaccaaatagtaagtttagaaggtgattaattatgcgaaaaggtactagtaaatgcacttcattgatagcactaattcttatatgtactcaaataatatgtatagatgcaaatgccaaaggtaaaggtaataatttaagggtaaatgctagatctgcgattgcattggataaggaaagtcatgcagttttatttgaacaaaatgcttatgaaatagttccaatggcaagtacaacaaagatacttacttctttaatagctattgaacaaggtaatctagataaaaaagtagtaataagtaaaaaagcagctggtataagagggtctacagttggatataaagaaaacgaagaaattactttgagggagttagtttttggattaatgtttaagtcgggaaatgatgcagcaatagctattgccgaggaattagggggatcaatagaaggatttgcggaaataatgaatcattatgctaggggcataggaatattagattcacattttgagtctcctcatggattggatagtagtaaacactattcttcagcatatgatttagcgatacttactgctaagggcatggattatgatctatttagagaagtagtaggaagtaaacaaatctcaaaagaaaagtataattttacaagagattataataacataaataaaatattgtggagaattccaggagctaatggtgttaaaacaggatatacaggccaagctggtaagtgtttagtttcatcaattaataataatggcaaagatgtgataattgtagttttaaattgtccagatagatggaatgtgacagaaaaaatatataattatgtattagagaaagtagcatttgggaatcatacagttaaagaattggtttagtaagcaatagtagatagttttttattactatctactttttttattaaataaaatatttagaaaatcaaaaataaatcattagagtataaggtatagattagaatattggaaaataaataattttaaacaattatatttgtgtcaaattagatattttaaaataatttatattagaagcaattttatctaaaggagaaaaaatggtaaaagaagctattgattgtatagatgcgggaacggagtattgtccatgtaaacttgcagagtatgggcagtgtttgacatgttcccaatgccaaggagaagttttttgtgattgtttgaattggaagggggtttgtatatatcaagaactccataataatggaaataaagcaaaagaagggcgtaaaacttttgaatgtaatgtgacagaggtactaaattataatgatgaattagtgataattaaatttaaagctcctcataaattagttatagatttggtgaagcctggaagttatatatttataagaactgatggaaatacttatttcgatgttccgatatctataatgaattcagatatagaaagtgacattatcatggttgctgttgaaattagaggggttaaaactgctaaattattagatattaaaacaggcgggaacatagtaatacgtggaccttactggaatggtgtttttggaattaaaaatatattggcccaaaagaataataaagcattagtacttgcaagaggtattggattagctcctatgatacctgtagtaagaaagttaatttcacaaaataatgatatacaaataataatcgataaagatccatttgaggaaaatttttctgaagaaattttatctgaatataaaatagaggtattagagtgttcactactggataagggcaagctctcagatcatgcaaaagtattgattaaggattcgcttaaaaatggaactaattatattcatgtagcaggagccgatatcttgacttatggtgttattaattatttaagcgacattaatagaaatgatgtctcactttcatgttgtaataattttaagatgtgctgcggtgaaggaatttgtggagcatgtacatcaagattttcaggtcacagagtaaaaagattctgcaaagaacaggctgacccgagaagtatttttgaagggagaagatttatatgaaggttattattgttggcggaggttggtctggatgcgcggcagcaatttcgagtaaaaaagctggagcagatgttactataatcgaaaagacagatttgttacttggacttggtaatgtaggtggaataatgcgtaataatggcagatatactgctgcagaagaattaatagctcttggcggaggagatctgattaagatcacagatgaaatttcaactcataaaaatatagattttccaggacataaacatgctacactttataatgttaatttaatagagggagttgttagcaaatatttgaaatcattagatataaatctaatgatggagagcagagttaatgacataaattttgatggacaaaaaataaaaggtgcttatcttagcgatggaacttatatagaaggtgacgtatttatagagacaacaggaactaccgggcctatgggaaattgcttgcgttatggaaatggctgctcaatgtgtgttttaagatgtcctgcttttgggcctagaattagtattagtgaaagatgtggagtttccgatattcaaggagaaagaggagatgatatcttaggggcgttctctggttcttgtaaattggctaaagaaagtttgtcagatgaaataagaaatgagttagattctaaaggtgttgtagttttaaaagttcctaaggaagatataaattatgataaattaagtacaaaagtatgccaacaatatgcgctcaaagaatttgctgagaatatcatactcttggatacgggacatgcaaagctaatgacaacttactatccgttatacaaactaaggaaaataaaaggattagaaaatgctaaatatgttgatccatacgcaggaagtaaaggaaactcaattaggtatttatcagttgcaccaagaactaatgacttaaaggtaattggcgtagataatttgttctgtgcaggtgagaaaagtggattatttgttggtcatacagaagcaatgtgtactggtgctttagctggacacaatgcggtaagattggctatgggaatgccgcttttgatacttccttcatctatagcaatcggagatatgataacttacgcgaatgaaaaggcgagtactagagaaggaagaaaagatagatatactttcgcaggttcagtatattttaataggatgaaagaattaggtctgtatacaatagatgtagatgaaattacaaaaagaatacaaaaagtaaatttagataatgtttttagccaaaaattattataataattattacaattaagaggaagttataaagatttaaaagacatggtatttaaaatcatgtcttttatttttacaaagaaacgtacattaagcattaatttaaataagttaggaaaatttattctataagttgacgttaattaaactttagttaattagaaagatagatgaaataagtttggctttttaacaccaatcatatgattgtacataacatatagtatataaaaactgaggaggaattagatatgagcaacaataataattgcgatattgcttatggtcgtcattatagaggaaaccaacttggtgataattattataggtatagggatcataatcatgaatttctatcaagcacaaattatgaagaagatgagaattgtgaagaacacaatcatcgtattgctggtactactggcccagcaataagggttggactatctcatgttcatagaatcgaagaagtcacagacacatttaatgatcataatcatagagtttgcattacaactggtccagcgatttatatttcacgaaataagcatattcatatagttcaagggcaaacatcattcaatgatgggcatgatcacgattatttttttactactctaattgacgatccatctaatgtaccagatagaaattaacgataaattaagatattttatttgcatatattattgcataaacaaatatgagtcgtcatagctattaaccacactctagtataaatagagtgtggttaattagtttttttattctttaagaatttataatgtatttaaatatagcataaaagtacatcaaaattgcaaataataaataaaaatactattcattctatttgaatatgttaagtatttaaaattaaggagtaacaaaaatggcagaaaataataaacaaaagaaattaacattgattacactaattctgatgatctttacatcagttttcggatttgctaatatgccaagatctttttatcttatgggttatggtgcaattccttggtttatattaggagggataacatattttataccatttgcattcatgatggcagaatatggatctgcatttaaagatgaaaaaggtggtatatactcatggatggagaagtctgtgggccctaagtttgcctttgtaggagttttcatgtggtattcttcttatgtagtatggatgataaatatatgttctactatttggattccattatcaaatacaatatttggaatagatactacatcaaattggggaatacttggattgaattcaactcaggttttaggggtacttggtgttatatgggtatctgcaacatatcttatatcaaaaagagggataagcaaaataactaagattacatcagttggaggaatagcggtagcacttctaaacatagttttgataataggggcaattataatatctatattaaataagggacaatttagagaggaaattacatctacaatgtcttttgttaattcaccaaatccagcttatcagaatgttagttcagttttatcattcctagtctttgctttatttgcatatggtggtatcgaagctgtgagtggacttgttgatcaaactgaaaatccagagaagacatttcctaaggggattttaatggcagcagctataatttctgttggttattctcttggaattttcttgattggaatatttacaaactgggcaggcactctttcaggtgaaaacatcaatatggcaaacgttgcatatgttgttatgaataatttaggatatactttgggcagatcaatggggttaagtaatttggtatctatacaagttggaaattgggtagctaggtttgttggattatcaatgtttttggcattaacaggagcgttttttacactatcatattctccgcttaaacagttaatagaaggaacgccagcaaagctttggccaggaaagatggctgttattgatgaaaacgagatgccaataaatgcaatgtttattcaaactattatagtagcagttatggtgctatttgtttctatgggaggaagcagtgcaaaattatttttcacaatgttagtattaatgactaatgtcgcaatgactataccatatttatttttatcaagtgcgtatatatcatttagaaaaaaagataatatagagaagccttttataatattgaaaagtaaatcatttgctatatttataggagttatagttacggcagtggttggattcgcaaatttctttacaattatcgagccggcaatccatggggattacaaatcgacatttgctatgattgcgggacctgtagtttttgctgtagcagcattattaatctatgctaatggagagaagaaaaaagatatttagaaaattgtttgtacatagtaaaaataactaggggttaaaatctctagttatttttattattaatattttcggctacattatgtatattaaggaaaaattaagaaatgttaaacaattattaattgaaaaagcaagaaatgagttttataattcaagtgtactatatgagctagtacacttaatacaattaggagggaagtttatgaaaaaatcaacgataattattatgtttggaattgtcattatagttactgcttttcttgggatggataataataaaatgtatcagaaacagaagcatttcgaaactgtgaatgaggttctagatcaactaaatgataaaccgttaaaagcaattgatgataccggaaagttaactgaaacaaatgaatttaaggaatgtttttcagaacgaaaaaggttaactaatttagagtttaatttttcgaaggtaaacatagaaaaagtatgtgatcttaatgaaaaggataaaagtgagatgctaagtgaatatgatggattccgaaataatttttctaaaagacgtccgataacaagagaagaaccagtaagcctaattgttgatgcatataattacagctctctaaaagaaaaagatgatagatcacaaaagctaaaagttaacttagtcctcgtagatgagggggaaggtttagtaattgattatattatgtatcattcttatgtagaaggtaatgacaatgcttagaatcgatcctaggagtagtactcctatatatgaacaaatagaacttgggataaaggaacttattctaaaaggagctttaaagatgggagagaaattaccatcagttagagagttggcatcaatacttatgataaaccccaatacaataagcaaagcctatggtgaacttgaaagagaaggtataattgaaactttaaggggaaaaggaacttttataacatctaattatgaaggtaagggggatcataaaaaaatggagcacatttcaaatgaattaaaaaaaattatacttgaggcaagttatgggggcgttagtaaggaagaatttataaggttggcacttcaaatattttccgagttaggggtggatgataatgatagaagtaaataatttatcctttgagattgatggaaaacaaattttggaaaatataaatattagaatagataaaaataaaatatttggaattataggaccaaatggcgtgggaaaaactacacttttaagatgcttaacaggaatttataaagggacatcaggaaatgtattttatgatgggcaagatgtttatgataatatagacgtcaaaaataagattggctatgtagctgatgagaatatcatgcaaacaaattttaaagttagcgaaatattaaagtattacaaatattcatataaaaattttgatgaaaagaaatttaatgaattaaataaaatttttaaagttcaaactaataaatatatattccaattatcaaaaggaatgaagatgagactttctataatgcttgctttttctattcatgctaaatatttaatattggatgagccaacatcaggactagatgcaatactaaagaataaattattaaagatattcgcagatgaagtttttgaaaatggtataactataataataagttctcatcatttaaatgagcttgagagaatttgtgatgatgtagctattttagataaaggcatagttacatatgaaaattctgtggaaaatatgaagaataagataaaaaagatacaagtggcttttgatgagcctgtttatgaagaagatttaaaacttaagggaatatttagaattagtagagttggcagagtatttactataataactgatgaatatgatgaggagtttataaaaagcttagaaaagtttaaacctttatttattgaagaaatagatctaagcctagaagatatctttatctataaagttgataaggaggataacgatgaaaaaatatttaaataaaggattgttatatgcatggttcaattctgctaaagctgctatagctataggactattagtatggggcgctgtagcatatgaaattataaagagcaatttaaatgatgttagaaatcgacttgcaaacaattttgataattactattatacgaatgtttgtaatgaatattttatgttatcaattatatttgtagccatatattttatagcaaagggaattaataagagaaatactgaaatgtttttatgcagtggaccatatactaaaaagcagattagatataatgaattcatatgccttttaattaccttaatactttttgtaataacttatatttatatagcaatagtatcatatttcggtaatgctgaatttatatccattatggaagggtattggaacatagttattatagaaacttcaaaaataatcttacttggaattattggtataatgtttatgttaataatagatttgatgttttctaattcagtaatagggtttattagtatgatttcgataatacctgcatctatttttatagtaatagttaaagttggttcgatacttgtatattttggagttaataagaattatagtttattggataaaataatagggttagattataacggtaaattaagaagaggtttttttgagcttgtatttgataggattagcgttaaagatataataatcagaaatttgtggattgaaacagtaattattttatttattattataattatgatcattgtttacagtgtagttcaaaataagtataaactagaaaacgctaataagatattttcatcacaaaataatgaaaagattttactgatattagtatcaacagcggctggatcatttgcatcattgtttttaactgaaagttttattcatagtttgcagcggaagaatggaaattctatggtattaataggatcagacttaatcaagggtcttggattagatataatatgcatgcttttaattggatttatagcctataaagtaataaaaagaatattaaaaaatatagtttaggtgataaaaaaagttttgataaacagaatatttataaattttaatttagtgagaatcatatgcagtaaggatacttgtagatggttctcatattttatttaaatcataaagaacaaaaaatatatgtatcgaatagaatatattaacaaaagaataggagatgatcaacatgtctaaacattctaatgattgttgctgctgtaaatgtaattcttgttgctcttgtaaacctagttgctgtaacgtttgcggatgcggcggcagctgcggaggatacggtggatacggtggtggatttggaggctacggcggctttggtggcggcggcttgggctgcggaggtggctttggtggctgcggaagctggctttggattttattaattttattccttggtggcggagcaggttgcggaggatttctctggtaatttgattaatcataaggagtacaatttaaaagtagccttataattagataatagaaacgctggtgacagcgtttctattactttactattcaaataaaaataattaggaagttgtattatataagtgaaaaagatataatctaaaatgtaaaagtataaatgtatttatatgctaaatggagtgatttaaattatggaagaaagattgcagaaatatctcgcaaattgtggagtagcttcaagaaggaaatgtgaggaattaataatttcaggaaaagttaaagtaaatggggttatagttaatgaagtaggaataaaagtagatccattaaaagatatgatagaatatgatggaaaggaaataaaaaagaaagaagataaagtttatataatgctcaataagcctgagggatatattagctcggttaaagacgaaaaaggaagagatactattttggatatagttaaggtgaatgagagaatatatccaattggcagattagattatgatagctcaggattattgttattaacaaatgatggggaaatttacaataaaataatccatccaagggtagaaataataaaaaggtatgtggcggtagttaagggagagataactgataaagataagatgaagtttgaaataggtatagatattggagggtatattactgctccagctgagcttaaagttattagttatgataaaggcgtttcgactattgaaattggtattcatgagggaaagaacagacaaataagaaaaatgtgtgctgctatacaccatgatgtattatctttaaaaagaatatctataggggaaataaaactaggatatttaaaaagaggggaatatagaaagttaaacaaagaagaactagattatattaatagtttatagaaaataactaatcgtaaatgacagataaaggaaaaatgattgtacatcattaataaattaaagtaagatattgattttaaaatataatacgtaatgaaagtagcttgataaaatattgcaaatttttaatatgctctgtgaaaaacaagttatttgttgaatatttagaaataagatgatagaattaagataatattattcaatgttgtaacaggaaggcaaaagatggatgaagtaaataatgaaaacagtaaagatttaatgagattaattcagggaaaatttataaggctaagtaaaggtcagaaattaatagctgagtacatattaaaaaattatgataaagcagcatttatgacggcagccaaactaggaatatctgttggagtttctgaatcaacagttgtaagatttgcgattgaacttggcttttcaggatatcctaaattgcaaaaagcattacaagaacttataaagaataagctaacaactgtacagagattagagcttagaaatgattatttttctgatggagatgcattaaaaggtgtactaaaagctgatatggaaaacatacgtgcaactcttgaaaaaattaatcaaaacacgtttgaagacgtagtaaaagggatttttgaggcaaatagaatatacataattggtcttagaagttctactgctcttgcggagtttttagggttttatctaaatataatactgcaaaatgttaaaattgtaagctatggaatttcagatgtatttgaacaaatgataaatgtaggagatggagatttagttataggaattggttttcctcgatatgctgctaaaactattgatgcattagaattttcacaagatagaggagccaaagtggttgctctcacggatagtttactatcacctcttgcgtctaaagctgatcacacattaattgcacaaagtaatatggcatcatttgtagattctttagttgcacctatgtcggtaataaatgcactaattattgcagtaggaatgcgagagaaggaaaacatatctgatatttttggtaatttagaacaaatatggcagacgtataatgtttattcttataataatagaaatgttgcagatgattaaaattctagtaaatagagctgttctcagatgattatgagggcagcttgtttttattagataaagataaatttattttgataagaatgataagtttagaggtgaaatattgaataaaaatatagagatgcctaaaaatgttgcattaatcattgataggttattagaaaatggatatgaggcttatatggttggaggatgtgttagagattgtattctaggaaaagaacctaaagactgggatataacaactaatgctaagccactagaagtagtggagttatttgataaagttatattaactggattaaagcatggaacagttacagtaatgttaaataaagagagttatgaaattacaacttatagatcagatggtgaatatgaagataatagacatcccaaagaggttaagtttgtgagttctttaaaggaagatttggctagaagagattttaccattaattcaatggcatataataatataagtggattagtagattattttaatgggatagaggatttggatgaaaaggtaataagaactgtaggtgaacctagaaaaagatttggcgaggatgcattaagaatgcttagggcaattaggttttctgcccaactagattttactattgataggttaacactaaattcaataaaagaacttaaagataatataagaaatatatcaaaagagagaataagagaagaatttaataagatattacttaataatccaagaaaaatagaaatgttgagggaatgtggaattttagaatacatagttccaggaataagcaaaatctataattttaataaaaacaattcttgccattcacatgatttatataatcatgcaattatagcaactgaaactgtagaatcccagatatatttgaaattgagtatgctatttcatgattttggaaaggcttgcacaataagaactgatgaaaatgacaatttgcattgcagttcttattcaaaagaatcctcaagaatagccaatgaaatattaaaatatttgaaatatgataataatacaattaataaagttacacttcttatacagtatcatgactataggatggataataaagtatctataaaaaaactattaagagaaataggtatagatctttttaaagatctaattaagattaagcgagcggatatacttgctcaggagtccaaaaactctaaaaaacatttaataaatttagatggggtcgaaaatattcttaataaaataattgataaagatgaatgttttactttaaaaaatttgaaaatcaatggcggagatttattgtctttaggatttaataaaggaaaagaaattggtgaaatcttaaatcatttgttggatattgtaattgaagatcctaaatcaaatgagaaacaggaactaattaaattagttatgaaacgatggagataaaatttattaatatagaatatgttaataatcaaaagatataaattcaaattaagcgctgctcattttgaatttatattttttattttaagtttttttaatttgtatctataaatatttaagtttttatttagttaaatctatataataaatttaattaatgagataataattgtgtgattgtattttgtagaaaaattggatataattatagtgaaaattgagaaaatttttacatttaagaaaaaattaagggtggggataagattatgagagagttaatgttttcaaacgtacaagaagcgtcaaattttataaataataattctaatataggatttgttatattttcaaatgtagaaaatgttacagaattatcaacattagtatcttcaaatgttatactttgttctacgtctggagagtatggaagaaatggttatgaagatggaattatttctggatttcaatatgatatttgtgatggtgaagttgtagagatactttatccaccaataaaaagtgtgaataatttaaaaggggcttatgaaaaaattaaaactaacaagaatgctttttcacttttattatgcgatggtctaactggaatggaagaaagtattataggtaccctctattttgtagatgataattttaaagtcataggtggaagtgctggagataatcttaagtttaaagaaacattcatatttataggtaaaaagcgtgttcatagtgtaatgattttctttaatataaaaaaaagaactactataataaaagaaaatatatatataccaatgggacaaagactattagtaactgaagccgaccctataagtaggacgataaagacattcaataaagttccagctagcattgaatatgcaagagttttaaatgtaaaagaaagtgatcttcctaattattttatgaataatcctttaggaaaaatgtatgaagatgaaatttttatatcttctcctatgaaagtaaacccagacaaatcaatcacattttattgccaggttatgtcgaatacctttgttgaggttctaaaaccagttgatccaataagccaagtaagaaatacagttgagaagattggatttaaacctagctttatgttgtcaataaactgtatattaagaagtttgaagtttcaagaagataatatttggaaagcaatagataaagaactactttcattctgccctaatactgctggatttgtaagctatggagagcaattttataaaaaacacgtaaatcaaactatggtaatattagcagttgaataaagggggatattaatatgtttaaatttaaaagcaaggaaataagcactatacaaaatcaaaatgaagttaagcgtaatgagaaagaagaatgcttcctatatgtgaatgaagttatggagttaacatctataatagaaaataatataaaaacagttattaatgaagaaggaaatatgacgtacgggctggataaacttcttgaaggtactgaatatacgactaagcaaacagaaaatgttaatgaatatttacaggttttatctaagaatagtgataagacagaaaatcttgtacaggatgtttttcttagtcttgataattctcaaaaagaaatagataatgcaagaaatgattttaatgaattaataaatcaggtcggcacagtttctaaggtttttgatgaatttatcaatttaatttcagagatacaaaatcagtataacagtattcaaggctttgctaatattataaatggaattgctcagcaaacaaatttattatcattgaatgcagctattgaggcagctagagttggtgaagctggaaaaggatttactgttgtatctaatgaaataaaaaaactttctgttgatactcagaaaaatgctaaagatattatgaattctttagatgatttgacaaaatcaatggagcaattatctagtaaatctaacgaaggaactgaagttataaataaaacaactaacattatagaagggtcttcgtctatactagataaaataatagatgctgaatcagaagtatataaacatgtacaaggagttcaggactctcaaaagaataatttacatggaataaaggagatatcagtaaatttaactaatttagttgagaaatcaagaactgaaaatcagcaattacaaaacctagtatatagcatacagaaaaagggtgattgttacctagacatacttaattatataaatcaaattaaaatccttaaaaaggaataaatgctgtataaaatatttttacatagtgagtaaactaacaagcataaagcaataaaagatgagtttagtagagctcatcttttattattttaaatacagataaatgattttataagggttaaaatattctaagattagtgatataattgttctgttagaaaattgtggtacaatctcattgtcagtggtaaagattagataatgcttaagactttaatattaaggagaaaacataatggagaatgttattaattatatggaaatatgggttaaggagtatatggaaatcttgttagccaaaacagatggatgtaaatgcgataaatgtaaaagggacatcttcacactttctcttaacaatttaaaaccgtactatgtggcaacacctttaggaaagataatggccaaaatagaaagtactaaacaacaagttgaaactgatataatagtacaagttacaactgcgataaataaggttagtaataaccctaatcatgatagataaacatctcaggaaaatattactactgatattaagaaaactataaaatatcgtttagaagaatacctttattttatggtttgggtggttctaccagtttccactagagccaccaccaccagaagagccaccaccgaagccaccaaaacctcctcctgatgatccacctctgggaccacggcctctaaagatgctactccagaaaataatctgaagtagtgaaaaagaaattctacctttattaaagataatatctagcaatagcagacctagcactatacttccaaacaccttagttccggtattagatttaatagtatttgtatttttttccgagatatttaatgatttatccagagtgatattatactcttttgctatataatcgcaaaaagtactataagaattaagtagaccttcaccatattttccttctataaaactaggcttagcaactgattccatgattctgctacttaaaacgtctggaatagcaccttcaagtccacggccaacttcaactctccatgccctatcatttaacgataaaagaatcaataagccgttatctttacctttttctccgattccccatgatctaaaaagagtattagcatagtcttcaataggtacactattagttgaatttatgataactacaacagcttgagcgccagttttgtcttctaattcttttcctatagagagtatgccatttacctcagtctcgctagctatatgtacataatcatttaaatatttgtaagatgtaggagaaggaactttaatttcagcacttgctgaaaggaggaaaattgaagaaacaactaaaagaagaaagcttaataatgaatttaaagatttatgtattaatttttctatcattttgtaaaatctactgaaggaacctcttttgaaccttcgctagctttatagagtggtttttcttggaaaccaaataatgaagagactatattacttggaaaacttcttcttttagtattgtaatttgttacagcagtattataatcttgccgtgctattgcaattctattttctgttccttctaactggactgatagatctctgaaattctgattagattttaattctggataattttcaactatagccaatagtcttgaaagggaaccggaaagttgattatcagcatcagcttgatcctgtatatttgttgcaccagataatctgcttcttgcattagcgatatcagtaaatatggatttttcttgtgtagcataacctttaactgtattaactaaattaggaattaaatccgatcttctttgcaattgagtgtcaatatttgaagatgcagaattggcagtctgttctaaagaaactagattattataactacttataggaatacctacgactatcaatattattaccacaattattgctatttttgtactttttcgcattaaaaagcctcccttctaaattaattatattatgtgcagaaatataaattttatatagtaaactaaccatataacaaaatttaaaataataattcaaaaattacaagtagctttagattagtgatttggaattaaataaggagaatatttatgatgttaaaatttaagtatcataacgataaacgaattttaattaacgaatcattatgaagtttaaggatatgatgaaatgattatgataatatgttaaaatataataaatttatacttaggagattaaaaatggtctatgttttagagaatgatatattacaaagtgataaaatggaaagtattacaacaaataataataaattatttgttgttgtcatcaaatttgatgaacttaaatcagtttcgggcatcctcaatataaacgaaaaattattatatgattgtatgaatggaagaacatctaaatttgaaagttatgaaggtctagattacatatctttaaagattcctacaattaataatgtattaaaacaatcaaaaaaagtaagtatgtttcttcagaaaaacgtacttgtatttataagtgatggaaatgatattctagaagaggtgatttctaagagtaaaacgggtgagattaaaggattgaatcttagcaagcttttatatgcattttttgataaacttacatttgaggacacttatcatattgaagaacttgaatatgaaattgcagcacttgaagaaggcttaatgacttcaaagaatgataattacttaaagaagattattatgttgagaaaaaaattattaaaattgaagaggtattatgaaagattattaaatattgcagaatctatagaagaaaatgataatggattaattgataaaaaaataataagatactttagaatgtttactaatcgtattaatagactatatcagaatgtgaataatcttagagattatgttactcaagtaagggaagcatatcaagctcaagttgacataaatcaaaatcaattaatgaggctattcacggtggtcacgactatatttttgccacttactcttatagtagggtggtatggaatgaattttaatatgccggaatatggttggagttatggatatccctttgtgatttcaataagtgtcagcgtagttgtgttatgtggtgtatggttcaagaaaaataagtggttataaaaataatacctcataattttataaataagaaattatgaggtattgcattaaaatggaattagattattttttgaattttacaaaataaagaatgatgcggcaactattaaatagacagcaaggagttgaactccttccaaccaatttgattctccatcgttggaaactctattagctattaatacagcaacaataaggccaatcagttcaaattcattgaaaacaatactcataggagtgaataataaacttaagaatattaatactggtgctacaaataatataatttgcaagcttgagccaatagctatttccaaagcaacgtccattttattcttcattgccattacaacagaagtactatgttcagcggcatttcctataatagggattaaaataataccaacgaaaaattcactaagtcctaagcttgaagttatagattctattccacttaccaagaattcactttctatagccactagaactgtagcaataactaatacagatattgatttctttaatgtccatttagcactaccttcttcttggttagaaactgtataaatatctttgtgagtgaagaatgaaaaaataagacttaaaatgtaaatagaaagcattattattgcaactattatacttaatccttcatatctagtattcaaaagagttgggtccacagtatgggtaaataaagcaggtacacacaagccaacaacagcaaatagtaacatacttgaagaaacttcaacaactcttttgttaaaagtctgagttttatgttttagcccgccagcaagcatactagcaccaagtactaacaatatattgccgattacagacccagctatagaagattttacaacatcaaaaaggccttctttaagagcaaaaaatgatattattagttctgttgcatttccgaaagtgccatttaaaaaaccgccaatcttagggcctgagtagaatgaaatttcttcagtagcttcacccataagtcctgctagtggtactatagataatgctgcaagtatgaacattattgatggagatacatgcataacaaattctgctataaagcttattggaataaaaataagcatatattttagtaatttcatgaaatattgcctccttgataattattataaatttgtaattctaattaattttaattgaaaattcaagtagtaattgaataataattagtgtttaataaatacatcataatattataaactataatttgacattatgctatatttttctaattaggaaaatagttaaaggtagtttacctttattttaggaataggaaactattttattatttgcattttatgtggtatattaatataagaaattagtgtatataaatgcaaagtaatgttgtatagagaaatatatactattaatgcaaataaattataaaattatttaaattaaggaggaaccgaaatgtcagtaaaaatgttgcatacttgtattagagttaaaaatttagaggaatctttaaagttttatagagatgcactaggtcttatagagactagaagaaaagatttcccagaacataaattcacccttgtttatttatcaaatgagatggggggatatgaaattgaacttacctataattatggtgttgaaaaatacgatttaggaaatggattcagccatactgcaataggtgttgaaaacttagaagaaatgagagaaaaacatatagaactaggatacgaagttacgcctttgaaaggattaccaggagaaaaaccaggatattattttgtgactgatccagatggatataaagtggaagtcatacgaagataatacttttatgcttgaaaaataagtgaattatataaatatatattagattaagagagattgcgaaaatataaaagtagtctctctttatattttaataatgtggaattcgagatgtaaagatatacatttatatggtataatttactgatagatttaagatagagaaggttagattttatggataaaaagaaaaatatttatatattaattggcgcaggaatagtagtaatcccatttattattagtttagctgctttctttttttacaataagacacacaaaccggaaaataaattactggagtactttagcttattaaattcaaaagaatatgaaaaaatgtatgatttggcagatggtgaaattatacaaaagatgtccaaagatgattttattacaaggaacaaaaatatttatgaaggtattggtgctagtaatattgaaatctatgtaaaaaatgtaaaaaaagatggtgataaagctaccgtatattatgaaaccagcatggatactatatgtggaaaattagaattttcaaatagtgcaactatgagtaggaagattggaaaggattatgctttaatgtggaattctcaagcaatattcccggacttagctgatagcgacaaaataagagttaaaataataaaatctaaaagaggagacatattagatagaaatggagttaaactggcaacagattctttttcatctaacgttggaattgttccaggaaacttaggtgaaaacaaagataaatcaattgatgaaatttcaaaagtattagggataactgttgattatataaacagtcaactaaatgcatcatatgttaaaccagatatgtttattccggtaaaggcaataccatatggtgatgaaagaattccgagccttcttaaaattccaggagttaaaattaatgataaagatgcaagagtttattctctaggagagcaggtagcacatctaactggatatgtgcaagctataaatgctgatgaattggataaacataaagatgaggagtatactgaaaattctataattggtaaatcagggcttgaaaaaacatacgaagatacattaagaggaattgatggtgctgaaatatatattcaaagtattcagggcgaaaagaaaaaatcaattataacaaaagatgttaaaaacggtgcggatttaaaattaacaattgatagcaatctacaaagcttattatatagtcagcttggtagtgataaaggaacttcagttgctatgaatcctaatacaggagaggttttagctttggttagtacaccagcatttaatccaaatgattttgttttgggcatgtcaggtgatgagtggaatagtttgaataatgatcctaaaaaacctatgtataatagatttcaggcaacattagtgcctggatcttcatttaagccaattactgcagttattggtttagatacaaaaaagatagatcccaatgcaaataaaaatataactggccttagctggaagaaggatagcagttggggaaattactcagttacaagagtaagcgattataaaggaccgtcaaatctatcgaatgcacttgtttattctgataatatctactttgctcaggcagcgttagatattggaaaggatatacttagagataagttaaatagctttggatttgttgataaaattccatttgaatatccattatataattcacaatattcaagtgataaggattttaaatctgaggtacaactagcagacagtgggtatggtcaaggtgaagttttggtaaatcctgtgcatctagcagcgctttacactatgtttcaaaatgaaggaaatatattaacaccatatcttgtgaaaaaggataattcagataacaaagtatggaaagctaatgttgtgtcaaaagactcagctaatacggtacttcaagatttgatacaagtagtagaaaattcaggtgggacaggtcatggagcttatactagtgggttaactatagctggaaagacaggaacagcggagataaaagcatctcaggatgataataatggtacagaattaggatggttcgttgggatgaccactaataaatctcccaataatctattggtagtaatgatgattgaagatgttaaagatagaggtagtagccactatgtagttcctaaagtaaaaaaggctctggaaactgtaaattagtaagattaacaattgcaattcatatatgaaatggctgtagatttatacagccattttttagtaaaatatactataaatatttatgttaattagcattcagatgaaattatagattaagaagtcaagatgaaattaggttaaaactcacgttcaaaaatacttactttttcatgatcatgaaagtcatctattgaatttataccaagtttatttaatacctcatcaagtactttactatgaactggaacctttataggtgaatcataagcaaatttatcggctgattccttaccttgttctgtaggaattattgctttaggaccaccaacacatccgccaacgcatcccattccttctaagaagtttgcatcaacatttctatttagagcgttttcaagaagttctttgcaatcttttactccagaggcttttgcagctttaaaatacttgtgcttttcagggaaaagttcttcaactgtttctgatacagcaattgaaacgccaccactgcgggcgtataatcttccgcctctagaagcgtactcaacagatggtacaccatccaaatcaccaggctttatgtctaaagttctgaatacttcgtcaagctcttgaaatgttaatacaaaatctactgcatcgtttaaatccttatctttagcttcagctttttttgcaatacatggacctataaaaactacttttgcatcggaatcaagactttttatcattcgtgcagcagcaaccataggtgaaaccgatggggataaatcaggaacaagttccttgtaaacttttctaagcattcctatccaaatagggcagcagcatgaagtaatcatcaagtctttaggcccattcacatgtttatcaaattcaacagcttcttttattgttaatacgtctgctgcaaaggcaacttcgatcatatcagtaaaacctatttttataagagcagccctgatttgatccatagtgacctcagtaccaaattgcccgctaatagcaggagcaactgcagcaaagacttttttattgttctgcattaaatctaaaacgggaagaaaataaactttatctaatattaatccatgcttacatgaatccacgcatacaccacaatttagacatttatcgttatctatgtatgttgatctttcttcttcatcataaagaatggcatcaaaaggacaagcaacctgacagctaaatttaccgtcttcatttctaggacatgattcatcacagcctttaagtttttcaattaatcttgtattaactgtatattctgtaattgctttttttagattatatacataattattatcgaactccatatcaactccacacaacgatctaataatctcaaaagtttcttgtggagactttttgtgacataccataatacgtttaagagtttcatcaaaattaccattgtaatatgatttaaccaactcatcgaataaatcattatatttattattcattaagacacctccaaattgcaaaaatatctattatatattattatatatttatttgcatatattaatactaaaattcagcataagttaaattaaaatagaaaaaaataagaaaatggaaggaaaaacaaatatagatgtagaagtaatatttaaaatacagttaataaattttatattaatcttgaattttattcaatgtaaacgtataattaaatttgagttttattcttattggggagatgtaaaaatgtttatttatatattaaatattttaaaagatggggcaaggaaaaataaaattgaggggttatcaaacattgaaattattaatgatacaggttgcatttcgaggttagcaaatatcaaaagaggttctaatcttaaaagttttaatagtgaaataggagatattgtaggaattttggataaatataaattgaatagaaatgatagaattgagattttaagtaagtttatagttgataatgactataataggatacttgaaaacacacatgacaatttttatattaaaaaaagagaaaaagtaattatagattcaatatcaatactagaaaacatatttataagggcactgttttagatccagagaggaatttgattgaaatactaatttaaaataaaaaggagcactaaatatagtgctccttatatccaatgaaattaagctctgtttactgaaccgaataattccattttttctttaactgtagctttgatagcttcgaatccaggatttaataactttcttgggtcaaatccttttccttctaaatcttttccagcttcaatatattttctagtagcttcttggaatgataattggcattcagtattaacattgatcttagctactccaagagatatagctttctttatcatatcttcaggaattccagtaccaccatgtaatactaatggcatagaagttccaacagcttcttcaattttagctaatgcttcaaaatctaatccagcccagtttgcagggtattttccatgaatgtttccaataccagcagctaacatagtaactcctaattcagctatttgcttacactcatttgcatcagcaacttcacctttacctataactccgtcttcttctccaccaattgaaccaacttctgcttctaaagaaagtcctttttcattagttatagcaactaattctttagtcttttctatattttcagctattggataatgagatccatcaaacatgattgatgagaatccagcttcgatacatttttttgcaccttcatagctgccgtgatctaagtgtaaagcaactggtacagtaatgtttaattcttcgatcattgctttaaccattgcagatacagtcttatatcctgtcatatattttccagcaccttcagatacacctaagataactggtgaattattttcttgtgcagttaataatacagctttagtccattctaagttgttgatgttgaattgaccaactgcatattttccttgtctagctttgtttaacatttctttagctgatgttaacattttacgacctccgtatacttgtatatttattataataactataatagcttaggaaaaatgatctatgtactttacacatcagtttttcctttttcaaacttattatactctaaaattaactatatgaaaacaataaattgaaaaatctgcttcttttaataaaacatatgtatctttatacgaaatttacataatatatatttagataataaaaatcttattttatgaaagagtggtaatatgtagaatttaatttaaaaaaggacttatgtggagaaattgatggtacggataaaaaatgctaaaagttagatttatattttgaaataaatatcatactagaaagtaaaaactttttataactacaatggtcataagatgagtaggcattttaaaatgaacttttagagcgcttaattttatatgtattatctagataattacaatattagaattttatataatttagttttattaattctattacatgtgaggaggtcattttttgtttaacataggagataaggttgtatacccaagtcaaggaataggaataattgatgttattgaagaaaaggaactcaaaggtgagaaaataaaatgttatataatacacttaattaataataccatgaaattaactttacctattagtgcagcaaatacattcaatataaggttagtgagcgatattaaaacattagagaatagtttaaaacatttggatagatttatgacagaagcagaaaaattttctaaaattaattataaagaaagaaggaatataagtaaaataaaaatgaaatcaggcacatttgatgaatttattgaagttatcttcgatttaacacaattgaaaagatggcatagtttaaattcaagtgaaaaacaaatgctaaatcatataaagaaaattgtagtagaagagattgctcaagcaaaatgtttaacaagtgatgaggcttctgagttattggatatctcaatgaatttaaaaagttaagttaaaaagtttgctattttactgaagtatgttataatgaatattgtaaatgaaataaaaggttttttatagatatgtaaatttctcctttagagaattatatgaatcaatatattaatctttagttaaaggaggaactttatatgacagataagactttagtatgcagagattgtggagaagaatttgttttcactgtaggggaacaagaattctaccaagaaaagggatttactaatgaacctacaagatgtatatcttgcagaagaattaagaaggaacaaaataatagaagataatattattttattaagagttgtaagattttcttacaactcttttttttattctttagaaatttatattccaataaaatttatggataacttaaaaaaggttgcctagatagttttggcgttttaagttgatagattagaaacattaataagaaatgctatagatatgggagttaaggtgggagcgtgttctatgagcatggagttaatggggattaaaaaagaagaatttattgatggggttgaaattggtggagttgcttcatatttaggatcaacagaaggttctggactaaacttgtttatttaattaataattgtttgtaatataaatatttcatagacttggtaattaataatttcaccaagtctatttttttattgtttgtttttacaatgattggtgataatatgaaattatagaagacaagtattgggattaaaatatataattagaatgggatatattttaatttgaaaatattatcatgcaggtaaaacaagttaataaacgtttatataaacatattaatatgaaagcgagggattttatgagagatttagaaaatggctcaaatttaaagacaaaaaagaaaaatacaagtatgatactagctgcgttcatgattttcattttgccaataatgctggtatttataggagcttttataggtggaataataggtgaaaatatgcaggtggcttctaatagaacttttcaaatcgtaggtggagtaattggctttttgttatcagccataatagtcaaagtgtttgataaacattcaaaagcagatgaaaagtcagagaagatttattgggatgatttataaataactgatagaaataataaggaattgctaaataaaaaatatttgttgacaattgtttgatatatagtaactaagcatatatttcccacataatttataagtataagaacttttataggagaaatatatgattaacttagtattaacaccgcttcactatatttatcttatttttatcattgtgattatattggctatggtgaagaagaaagatatctctcttttatgtatactaggcatttttattctgggattggctggaacagaatcaatttataaatctgtaatgggagtatttaatagttttgtttatgcagcaaaggaattgatgccaacaatttttataatatcaataataacagcaatgagtaatacattaatggactctggaataaatgatgagatggtgtctccttttagaaaagttataaaaaattattggattgcttattgggtaattggaatttttatgatggttttatcgtggtttttctggccatctccagcagttgcacttataggggcgctgtttctacctattgctaagaaagctggacttccagctatgggagtagctatttcaatgaatttatttgggcatggtatagctttatcaagcgactatataattcaggcagcaccaaagcttactgctgatgcagcaagtataccagtttctgaggttatatctgcaagtattccacttgaactaacaatgggaatagttacaactgtggctgcattttatttccttagaaaggagattaaatcaggagagctacctagtgaatatgaagaaatggaaagttcaacatcaatttcaagtccttcaatgcttatttcttcaagaaaaataagaaggtttttagctttattaattctagtattatttgccttagatatttttataatgtatattgctaaattacaaggtggtgatgcaacagcgcttattggaggtactgccatatttatcctaagcttaatttcaatactagcttataaagaaaaatccctagataaaattactgataatcttgttaaagggctccagtttggtttcaaaatattcggagttgttataccaatagctgcatttttttatttaggtgactcggcgtttacagatatatttggaaagatacttccagaaggctcaaacggcatagttaatgacttgggtgctgcacttgcaaataacgttccaataaactcaactatttccgccggtacacttacagtagttggagcaattacaggattagatggatcaggtttttcaggaatatctttggtaggatccatttcaaaaatattctcaactgctctgggtggtggtgtagcaacgttaacagctttagggcaaattgcaggaatatgggtaggtggaggaaccgtgatcccatgggcactaataccagtagcagcgatttgcggtgtagatgcatttgaattagctaaaaagaacctcaaaccggttgttataggattaatcattacaacaatagttgcaatatttattatttaacaattgagaagtaagctaaattcaataaatatactgtaattaaaataaagaattcttattataagactccgctaatttatgatttaggggagcctttattttttatataataaaaaatgcaatatgaaatataaatgaacccatacaattgctagagaaatcttatagtgttataataatcacaacattttcctatgaagatagaataatacaataagggggactattatatggaaaataagaattcaagaattgtaaaagtaattcagacaggtgtccttgcggcattatgctttgtatcatttacttttctttcgataaaaatacctgttggtgaggatgcggtttcgcttcacattggaaatgcattttgtgtactagcagcattgcttcttggaggctggtatggcggattgtcaggggctataggcatgacaatatcagatctactagatccaacatatgcaattggagcacctaaaacttttattttaaagttatgtattggcttgataactggtttaattgctcataaatatgccaaaatagatgaaagtagcgataaaaagtatatagctaaatggactattattgctgcaattggaggattagcttttaatgtagtttttgatcccatagctggatacttttataaacaatatattcttgggcagccacagcaaatggcagcagttttagcaaagataagtgtatttgcaacctttgttaatgccgtagtatcagtaatattagtaagcattatttataatgctataagacctgttttatcaaagtctggattattattgccagttggagaaagaaaatctatagtaaaataataactttatttttgtatgtaagaaaccattaaaatcacaatttatgattttggtggtttttactaatttaaaatacaataaacttttatttttataaggcaatacgatcatatagatgagagatttattcttgtgttaggttaatgttcgtgtttgtaagaaaaaaaagaagaaaaaaataatttgttattgatttttattaatatatgagctaaaattacctagtaataagaactatttttgaaaaaaagttaataatattcacttatataaatctgataataagggtcggatgtttctaccaagctaccgtaaattgctataggactataagtgtctacttaaaaattatatttaatgtcaaggagagataagaatgaattatgatgtaataatagtaggtgctggtccagcaggaatatttactgcatatgaactaaagaaacaaaaacctcaatctaaaatccttttagttgaatcaggaaagagtattgacaagagacattgtccaaaagataaaactaaaaagtgtgtatcatgcaaaccttattgtcatattactactggattttctggcgcaggagcgttttcagatggaaagctatctttaagctatgaagtaggtggagatctacctgaacttgcaggagctgatttaatacaagaatacatagattatacagattcgatttatttggactttggagcagatactaaagttgaaggtgtaggaaataatgaagcagttaaagaaataagaagaaaagcaatacaaggtggattaaaattagtagattgtccaataagacatttagggactgaaaaagctcaagagatatacttaaagattcaaagacatctattagatgatggtgttgaaattaaatttgatacaacagttaaagatcttctaataaaaaacaataaagtatttggagtattaataacagattcattaactagaagtaatgatgaagagatgttttcagataaagtagttgtagcaactggcagaaaaggcgctgattggttaaaagacatgtgtgttgaacataagataggacatagtgcaggaccagttgatataggtgttagagttgaacttagaaatgaagtaatggaaagtgtaaataatgtgctttatgaatctaaacttataggacatccagcaccatttaaagacaaggttaggactttctgccaaaatccgggtggttttgtaagtcaagagaattatgataataatttagcaatagttaatggccattcgtataaggataagaaatctgataatacaaatttagcaatcttaagttcgcataatttttctgcacctttcaatgagccaattgaatatggacagaaggttgcagaacttgttaatatgttgggaaatggaaaaatattagttcaaagatatggtgacatattagatggtaagagaacttgggaaaaagaattgtttgaatcaaacgttagacatacattgccagatgcagaagctggagacttaacatcagcgataccatatagaaccatgacaaatattctaaactttatacaagctatggatacagtagtcccaggatttgcaagtagagaaacattattatatggtccagaaataaaattctacagtaatagaattgatttagataaaaatttcgaaactaatataaaaggcttacattgtttaggtgactcaagtggctggactaggggacttatgatggcatcagccatgggtgtgataatgggtagaaaactttaaaaatattgaaaatactaagttgtattaatatcaagtattcataaatacaggggatgataacatccattaaacagtattctacataattttttatgaaaattatgagggatgctgttttttataaaagatatattaatttaaatgatgtgttattagtaataacctaaagttaagattataaattgtataaagaaatatagatatccaatttaagaattcaacttattagattaatgtatttacaaatttgctaaaactttaagttcatatcctcactagaaatcataaatatatttgtgaagaaaacatttgaaaatgacctgttaaaggttcttagctgtaggttgttccatttgcttgtcaaactgaaagttggagcatgctaagatgggacacaacctgctgcttagaaccttcagcgatattttcatagcttttcggaatcaaaatatttatgatttcagcgatttatatgcataagaccaggtcttagttaggctgtctatatgagaattataaaattaacaagggtaacttattacaatacgtaataagttacccataaacgattttatatagaaggataaataattaataagaaattatcttattttcttattatagctgatagttattacaaagttataacaaatatgttaattcaatataaacattatattaaaataaccttaaatatgatatttaaagacagtaaaaaaagttttatatacatttaataattacctttaaatatgtaataaatattgtaaggtaattattgcatttaatgttgatttttcttatattattgttataatatatacatagaaagacataaagtaacataaatatacaaagattgggaactatgaagaattctctgtatttgggcatcttgagaatttagagttaatgatgcaacccaccaatcaaaactaattaatttttttaattagttttgattggttttttatattttggaattaaacgtaatagagctaaaagtaaataagatagttttttttaagttaatatatatgagaggtgatatgctatgaagatacataatgaaatcatgaaagttataaatgacaatttggaaaagtgttctaaattcgaatttgttgcagagttaagagatttaactttagcagatatgtattatattgaaaagatatcgagtattgatagtataaaagcgaagttcaattataaaataataaataacacttatataaagattaattattcacgttaattagtatgtaggaagaggaaagacatgacactaactattaagattaaattaggtaaaataaagaaaacagaagacgatgataataaaataattacagacttttctcataaagaggtttaattaataagaatcatggacattagaaatattgtttatgattcttatttttttgttataataatatagtagatttgacgaggagagtaatggtatgaataaaaaggtatatgagttattagaagagataaaattacattcagagaaaattagtgattgggagcaaatgacaaatatatttgctaatgctattaaaagaaaaggattgaataatgaagaggtcgaagagataagtgagagaatatttagggaagtcagaaaaaagtagaagtgaatttaattgattcataatataaaggagtttctttaattttataatataaagaagctcctttttcattaatacatatatttttaactagtataatccagcgcttttaattctttttctaatctgaggccctattagtgctgcaactaccatctttgcaatgtcaccaggaataaatggaagaacaccaattgctagagccttattaaatggtagatgtgcaacatatgctagccataatgttccgagcatgtaggttactagtgtacctatcagcatacctaaaaagcacataaaaattttattaggaaatttgtcaatgaatattccacttataaatgccataaaagcgaatccaattaaatatccacctgttggccctgctaatttagtaaatcccccagagaatcctgaaaaaactggcaatcccaatgcacctatgagaatataaataagataactaattgttccttccttttttccaattatatatatagtaaggtaaatcgctaaatttgttaatgtaattggtactatgccaataggaattgaaaatggtgcagttgtacatataaaagcactcattattccgattattgtcaactgacgcgcgttagttctacgtatattttccataattttaaatctcctctatatagtatatttcttttctataattctttttaaattgaaaaaccgagtgtttgcaacattattttatcttggcatgtattgttacctacagtagttaacatatcaccagttatcgttgcattagatccagattgaaaaatttctattcctccatcttcaaaataagttcttccggcagccatacgaatataagctgttggatttatgtaacgaaaaattgcaatcgttcttaagatatcgtaattagaaatcctctttaaattttctaatggagtacctttgataggcattaatacatttattggtatagatataactccaagttctgataagcttatagccatgtcaattctgtcataccaagtttcacccattcctataataccaccggaacaaacttttaaacctgcattttgcgctagtttaatttctttaatcttgtcatcatatgaatgagtagtacaaatattatgaaagtttcttttagaagtttctatgtttgcatggtacattgtgactcctgcttcttttaaaagtacaaattgttcttcgcttaaaaaaccgtgagatgcacataggttgatggaacattctttattcatcattttgtatgcttgtacagctttatcaaaatcgctcccaactaaagctcttcctgctgtaacaatagagtatctatgtacaccattagcttcattttttttgcagtcttttaaaattacattaggatctaaaaaatcatattttttaatttctgttttgtggtggtttgattgagcacaaaacttacagttctcgctgcattttccactgcgaccattaataattgtacaaaggtccacgctttctccgcatagtgttttacgaattttattagcaccatcacaaattttctttaaatcacaagttaataaaaattctaaatcgtcagatctagttaatcgtcttccgttaataatttcttctgctaatttttccatataattttaccacgccccaatttattaaataatttcaagacaagtatataattaatatttaatattgtcaactcgatatgaaaatatagttaacaatattgactgtgcttaatatattcatataaaaccaatggattaacaaaatattttataagtatatataatatattgcaattaagtttctatattatgctcttaattgagcacttggtttgctagagattcaaatgttaatttattattttaatctatataagaaattgcatagcactaataaaaataaagtttagtttaataagaacaaattttaatagaatagagtaatgtaatatgtagagtattcgaatagattaaaatatggttatgagtaggtgctagaatgactattgattttgataaagttatgcttaatataaaacaagggtattataaatatattggttcaggttctggcaggaaagtatttgatttaggaaatggatatgttttgaagatagcaaaaaataaagctggaatagcacaaaataaagctgaatatattatttcggataatgatcagactaagttatttgcaaaagttatacaagtttcaagtgactttagcttacttataatggaaaaagcaagcaggataagtgatattttatatgtatggaagcattttaatgtatcgaataaggatgaatttttaaaaactcaggaattacaggaaataaagaaaaattataggttattattgggggatttttgtaggaaaagcagttggggcgtgattgatggaaagccagtcatcattgattatgggtttacaagagaagttgtggaaaaacattattctctttaagattttgaattcagtaaagtatatttgagccttaaattttaaataaatttaaggctttttctaagtataaagcattgttatattgatatatatatagtttagagacatttcaagtgatttatcatagtatgaattaatgattaattttttgaaaggaaaaataggatgcatactttagggcagggaggtatctatagtttaaatgattttaacaatgatgaatgttcacctaataggctaaaagttattggaaaaggaacggtaagtgtaaaaccagatttagcagaaatagtcgttggagttataactgaagatttgcaattggaagtcgcgcaggaggagaatgctaagataactcaagaagttataaatagtataagagcattgggaatacctcttaagaatatacaaaccgaaaattatagcatacgtccaaattatgattacatcaatgggaagcaggtttttagaggatatgaagtaataaataatttgaagattttaattagtaatattaataatgtaggtgaagtaattgatactgcagtaagcaatggtgcaaattcattaactgggattatctttattgtctcagatgaaacaaagtattattatgaagcgttaagaagagctctacaagatgctcaaaataaagcacgagttttagctgatcaacttaaagtaaagttaaatattataccaattcaaataaatgaacaaaatgagaccactagtacaccactagtaatgactcttaaatctaccagcaatactacccctattgaagcaggagaaaatattataaatgcagatatagaggctatattcacatatgtaggataataaaaataattgctaaaaagagcagatattaatttgagtttttaaacatttattttagttttaatttatgaaaataaaaagccaatgcttaatattaagcattggcatagaatgtcttatataatatccaaaataccggtactctaattttgacccctatccttcgataggtgggtgatctcacagatgattcaatcgccttcaaagccgtaaaaggactcatatgaaagtacatttccacatctagataattgaactcccgtattttaagtgtaggttcaaaataagagcttaacgaatattccagaatttataatcaatacataagcctgcttgaacaacttaatatcatttgttcttaggccgtgaagatataataacatatttaaatttcttatgcaagaggtttttatgataatttagactaatgtctatagataatttgtaatagtatttacacaagaaatttaagttgttttattaaggaggtttagaattaatataacaatatcttataaagaaactagttaaacctgcagaaatagagaatatatgatacaactaaatattactttagaaacaaaataatattatttataaaatatattgaaacaaaatttcaaaggtgatatgatatatatatcaagtgaaaacgtagtcaaaattaaatgttttatatggaggcggtaattgtggagagtttaaatttgaaaaatctaacaactgaaagtagaaatgagacgacaataaatatagataaagtatcaactttagaaatggtaaaaatcatgaatgatgaggacaaaaaggtagcaaacgctgtagaaaaagagcttcctaaaatagcaaaagctatagatatgatagctgaaagaatccatagaggaggaaggttaatttatataggtgcaggaacatcaggaaggcttggtgtattggatgcctcagaatgtccaccaacatatggagtttcggaagagttagtgcaaggaattatagctggggggaaagaagctatatttagagcaaaagagggggcagaggattcagaagaattagcagtggaagatttaaagagtaaaaatataacagagaatgacacaataataggacttgcagcctctggaagaaccccttatgttataggaggattaaggtatgctgatcaaattggtgcgttaacagtttcagtgacttgtaacgaaaattcagatgttgcaaaggaagcttatatttcaattgcaccagtagttggtccagaagttgtaacaggttcaacaagactaaagtctgggacggctcaaaagctagtattaaatatgatatcaactggtgtcatgattaagcttggaaaagtatatggaaatctaatggtagatttaagagctacaaatgaaaagctaattgaaagagctaaaggaatagtttgtaaagcaacaggtataaacatggaagaggcaacagaagcactaaataaaacagattacgatgtcaaactagcaatatttatgatgctttcaaagctaaataaagatgaggcgagaattaaattagacaaaaataaaggttatatagctaaagcgttacaagaaatagataataagtaaaggagaggggatttatgacaaataaagacattgctataaaattagtagaattagttggaggtaaagataacgtaaaatcagttactaattgtatgacacgttgtagatttgaattaaataacttttcaaaagctaatattgaagaaattaagaagtcagaaggagttcttggtgtagttaagactaaagaacaactacaagttatttatggaccaggaaaggtaaataaagtaactgaagaagtaaagaaagttataggaacaaaggtagttataggagaagatgcagtagctgaaacaaaggctaaattgaaggaaaagaatgatactaaatttaaaaatattcttaaaaaactaggaaatgtgttcatccctttgattccattatttgtggcttgtggccttgtgcttgcaataaataatattgcaggagtgtattttaaggatgcttatacaaaaacaacagctgctcaaattatagggcttataggaaatggagtattttctatattatcagttttagttggtgtaaatgcagcaaaagaatttggatcacaaatgccaatgttaggtggagtattaggcggaattctttcgtcagcaactcttgcaaacataactctttttggacaaaaattaactccaggacgtggaggggttatatcagtaatattagtagtagtgttagcatgttttattgaaaaagcatgcagaaaagttgtaccagatgtatttgatttgtttgttactccattagtaacactttcagtttcagcattagcagcattgtttattcttcaaccaattggaggagctatttcagatagtataggattcttagttgcaaaaacaatagcatcagacaatattcttatagcagttatatcaggtgctgtatcaggaggtttattcttaccactagttatgacaggaatgcatcaggcactaactccaatacatgcagatttaatagcgaatgttgggtatactgtattattgcctatactagcaacagcaggaatggcacaggtaggagcaactatagctgtactaagaaaaacaaaaaatgaaagactaaaaaaaattgctaaaaatggattagtaccaggatttttaggaataggagaaccattgatatatggaataactttaccacttggtaaaccatttgttggagcttgtttaggagccgcagtaggtggtgcagcaatggccatatttaaagtaggagcagttgccatgggcgtatcaggactacctttagcattgttaatcgcaaatgggaaaattggagtgttcttaataggagtattggtctcatatgcaagtggatatctatttactaatattttaggttttgacgacccaattgaataattttaaaaagacccgaaagggtctttttagttaatgaatagcagaataaaattatagtagctatataaataaattatcattatatgtgaattataaaaaacttttatttaatttcatataaatctagcaaaggggcattattatgaattatggattttctgtttattttggattggataatactaaagaagaaaatataaaattgttaaaggatgcacataatcttaatattacaaggatatttacatcccttcatataccagaggcaaattatgatgttttaaagttggaagtaatagaattctttaagttagcaaaagaatataatatggatataataagtgatatctcacctaatacctttaagttcttagaattagagaatatggatttaaaaggattggggaatatgggagttaagactattagaatagattttgggtataccgaagaagaaatagcgagaatgagcaaaaatcattatggaattaaaattcaattaaatgcatcaacaattactaagagattttttgagagactagataattattcaccacactatgagaatatagatgcacttcacaatttttatccaagggtgggaactggaatttctgaaaaatgtatgaaagaaaaaaatactattttgagtgaacgaggaattaaagtttctgcttttgtgcaatcgaataatagaagaagagcacctttaaaagatggattaccaacattagaggatcatagagggaaaaatgtaagagaagctgctaaccatttatttgcattaggaaatcaatgcgttttcattggagattcgcttccaagtgaaaaagaactagaagatttatcatcattagatcctaatgcagttgagctactaatagagttaaaagattacaatgatataactctaaaattgctaaaagaaacttatacccacagaatagatgagggtagagatgcaataagagcagctgaaagtagattacttcttaatggagaaactatagaaccatttaatacaatagacaagaatttcggtgacattacattggacaatgtaaaatatatgagatatatgggagaattacagattcttaaaacaaatcaaaaagctgatattagaacaaatgtcatagcttcagttgcgaaagattacttatatctattgaaatatatagatggtggtaaaagattttattttaatataaaataattgtaagagtaaaaccaagtacgataaggtgtgagattatgaatgtattacagtatattaagcaaaattatgacagctttacagatagagaaaagttaatagcagattatttaatagaaactaaggaaaggattatatcaatgtctgcaagagatatagcagaggctaccaaaacttcagctccaacagtagtaagatttgctaaaaaaatagggtttaatactttaaatgaattgaagctcaaattatctattaatattagcaaagaagaggaagcaggagctatacagtttcaatatttagacaacgatttaggaacaaaaaatattatctatggaattaaacaatcagtagattcaattatggaacaaacggtcagcttactagatgaagaatgtttagataaagcaatagaattacttataagcgctaaaaatatctatatttttagtgtaggggtatcagggcttgttggtcaggacttctattataaactaagcaggatgaataagagatgtatatgtaatacagatactcaccttcaaataacttcatctgtattattagaagaaggagatgtagcactagcaatatcatattcaggagagactaaggaagtcattaagtgtgtaaaaaatgcaaggaatagaaaagttccagttatagcaataacaaaggctagtgtaaataatactatagctgatatttctgatatagtaattcgtataccagctgtagaaaaatccataagagagggagcaattagctcgagaatttctcaattagcaataatagatatgttatatattgggatgattagaaacaacataaaagaagtagaggagaaattaatttctacaaggaaagcagttaaagaactatagcagtaaaaactatataagaattaaaacatatttacatttaaaagtgaaaaagtatttaaatttaacaatttaaaaaggtataaagaaaacaagttataaagggaaaaatatataattttaacaagaaaacaatttgagaatataacaatttataggaaaaatcagggatatagagcatttatatcgaagaagcaattgcaaaacagcaatttataatgcagaataaaaggctatgaaatgtaataagtaagaagatgtgtggtaaatagcttataaaaatattaataaagagggacatagtgaggagaaggaaaattcaaattataaatatcataagattaaaataaaagctatggttataagagtgtttgatatcttataatcatagcttttaaaataatgaatttttaaaaatatttagagggagagttaaaatactttaaaaagtatttaactcttattattttttaaaaaattttagaatctaataatcagaatggtagctatttaattattagatctccatcatatgatgtaattattttatataaatcaggacgacgatctctgaatattccccattcaatacgttgtgtctccaattgatctaaatcaaattcagcaactaatactgtttcttctgtacgattagcttcaacaagtttatttccttgaggacctgctataaaagaagaaccataaaatgttattttagaatcttcatcttcttcaactccaacacggtttgatgcaattacaggaactaaatttgcagcagcatgacctaacatgcaagcttgccaatggtcttttgaatcaatagaaccgtcttgtggctcagaaccaatagcagtaggatagaatatcatttcagctcccattaaagtcatacatctagcagcttcaggataccattgatcccaacagatacctacacctattttcccgtagcgtgtattccatactttaaatccggtatctccaggattaaagtagaatttttcttcatatccaggaccatcaggaatgtgactctttctgtaagttccaagtatttcaccattagcatcgattatcgctatagcattatatctagcataattcttcttttcatagaagctgattggtaacactaccttaagctctttagcaatttctttaaaatgatttattgctttattttgtgctacttcggtagcatatacgtagtaatcagacttctctttttgacaaaaatatggagtttcaaataattcttgaagtagaataatttgagcaccttttccagctgcttctcttacgaatttttctgctttagaaatattttcatcaatattacaagaacagctcatttgtgtagctgcaactttaacttttctcatgttatcacctcatcttatttttctatagtacttttaggtttcttggaaatggcatttgttgagttgtgcaatgtacattaccgccttctttaataacagccattccatctacagttcttatttttctttttgggaaagttaaacttaataccttctcagccattttatctgcttctgatgcatttccaccaaaagtaggtaagataataccatcattaacaaaataaaagtttagataacttagagttagcctttctcctttgtattcagctctaggtggttgattaattgggataatttcaaactttctgccctttgcgtctgttgaattctttaaaatttcaatattttctaaagtaattttgtaatttgcatcatttggatcatcacaagtttgaataattattttagtaggtccagcaaagcaggctatattatcaacatggccgtcagtttcatcaccatctagtccgttcttaagccaaataattttttctatgttcaagtattgttttaaatatgtttcaatttgttctttagtaaggttgggatttctgttagaatttagcaaacattcttcagtagtaattaatgtcccctcaccatcagtatgaagagaacctccttccataattaaaggagcatcaaattttttaatattgtaatgctctaaaatttgtggagctactttatcatctaaatcccatggcgcatatttttcaccccaggcattaaacttccaatttacacctgctctatttccttcatcgtcaattagaaatgtagggccattatctctaagccatgcatcactatgttcaatagggagtagttctatgttagactcactaaaaagtttttttacattatccaattcatatggattaacaattactgaaactggttcaaattcagcaattgcttgaatatattctgcatatccagcacaaacatctgtatagttatctggatgacacattgaatcttttactggccaagatatgaatgtacgctcatgagcagtccattcagcaggcattttataattaaaatcttttggatacatacaatacctctttttcatgcttatattttatatttttaatactatatatagtatctatcatataataaactccacattgcatcaatgtcaaggcctgaattataggaagaatatagatggatttttaacggttacatttttaagaataaggtatattttttacctcgtttatgtttttatgaaaattgtagaaatatatatctataaacgttatcatagcgctaatacaaaatattacactatttttataaattaaacgtataattcattgtgctaaaattatagtggttattataaccatgtttcatagaataaagtatggagtgattattatgagctatattcaaaaaggtacacgtgaatttcgccatgctagtattgctttatttgctggcggttttaatacatttgcgattttatattgtacacaaccattaatgccttatttgtctaaggaatttggtatatcacctacaatggcgagtttgtcactgtctgttacaacatgtacattggctgttagtatgttgatttttggttcattgtcagaggtacttgggagaaagccaattatgtgtttttctctttttgcatcatcaatactagcggtattgacggctattgttcctaattttaacagtatgctagtaatacgatgtttgcaaggatttgtcctagcgggattacctgcaatagctatggcttatattagtgaggaaattgacaaatcaagtttaggattagtaatgggattatatataagtggtaattctataggcggaatgagcggacgtattattataggggtaattaatgatttttttaactggagattagcgttagcagttataggtatcttaggacttatttcaagttttttgttttggagaaagctgcctttatcaaagcatttcgaggctagatcctttgaaattaaaaatttaattaaatcaagttttaatcatttaaagaatcctaatcttctttgcttatattgtattggatttttaattatgggaagttttgtttcgttatataattttataggttttcaattaattgaacgaccatacaatttgagccaaaccttagtgagctttatttttgtaatatatatagtaggaacatttagttcaacatttatgggacgtctagcagataaacatggacaatatataatgttatgcatttcaatttttataatgttatttgggataagcattacattaaatgtaagtcttttgctaaagattattggaatagcccttttaacatttggtttttttgcaggacactcaataattagtagttggattggcaaaatagcaactcatgataaggctcaggcgtcatctctttatttattattttattatgttggttcaagcgttggtggaactgctggaggaacgttttggtctttatacggatgggaaggcgttgttatcatgatatcatgctttttagcagttgcattttttattctaattggcttatcatcagttttaaaacttattaagatagaaaatcatggatagaacctcgtttatttgcaagaaatcaaaaagccaatgcttaatgttattaagcattggctttaaatctctaaaataagatccaaaatatcggtactctaattttgacgcctatctctcgataggtgggtgttttcacagatgcctcaatcgcttttaaaaccgtaaaaggattcactcaaaagtacatttcatcatctaaatattaaactcccgaatttaatttgtaggttcaaaataagagcttaacgaatatctcagaattaataatcaaggaaacgtgcactcattgttgacaattaacatacttgcgctaccaatatagttagctcaaactaggtttatccacggcactcagaagttatcatttaccgctgcttccttccagatctgacggaattcacgagtttctgctgcatgggacccgattctcaacaccacttgtattagactgaccaaatggattaaagcctataatgagaattcaatcctgctatagcggattgcaggttacagggcaccgctagctccccatctagcacgaaaattacttataatgacaagcattttcttgccgtgaaataataataacatctttaaagcttatattcaagagacatttccgtgggaatttaagtgcatatttgataatttttcagtatttgaaaaattattcttctaaaaagttgtatgatcagttaggaataaattatcgtaacttgttgaacaataataacaaatatgttcatataacttgagtaaggagtactatttatgagtattaaaaatgttcagcgtcaagaaatagaaaaagtttatggtaaaataagtccatttgaattcaagaatgaattaataaatttagctgaggggcaaagaaaaaagagcgcccgtacgttattaaatgcaggaagaggtaatcctaactggactgctgcaacacctagggaagcttttttcacttttggaatttttgcagtagaagaaacaagaagagtttggaatgatggcgatttagctggtatgcctaaaaaagaggggatagctgagagattgtataactttttagacaaaaacaaagagatgccaggaatagagcttttaagaagaataatcgattatggtattaaaaatcaaggttttgatgcagactcatggatatttgagctcacagactctattataggagataattatccagtgccagataggatgctaatacatattgaaaaaattgttcatgagtaccttgtctcagagctttgttataacaaaccacctgtaggaagatttaatatttttgctgttgagggagcaacagcagcaatgtgctatatattcgatagcttaattgcaaacgaattgttggctcctggagataaaataggactaatggttccagtttttacgccttatttagaaataccacatttgccacgttataactttgaaattgtacatattgaagcgacagaattgactggggatggaactcatacttggcagtacccagaatcagagcttaataagcttaaagattctagtattaaagctctatttgttgttaatccaagcaatccgccttcagtagcaattaaaccagagagcgttaagcagttaatagatatagtagaaaattataaccctaatttaatgattatttcagatgatgtctacagtacttttgtaaataattatagatctctgatggcagacttgccatataatacgataggtgtttattctttttcaaaatattttggagtaactggatggagacttggaacaatatcactttattcagagaatgtctttgataaattattgaagaatttaccagaagataaaaaggccgagttgaggcagcggtatggagatctttcaacaactccagatgatataaaatttatagacagaattgtagcagacagccgacaagtagctcttaatcatacggcaggattatcaactccacagcaagtccaaatggccttcttttgtacgtttgctttattagacgaagaaaacatatataagaaacaaacaaaagatatttgcaaacgaagacaaaaacttttgtttaagggtttaggattagatttaagagaagatccgtatgatgctgcatattatactgaatttgatttattagaatgggctacttgctattatggaagtgaatttggcgaatatcttcaaattaactataagccggtagatattttatataaattagctgaggaatcagctatagttctattaagtggtggaggttttaaaggaccagagtggtcaattagaatatctctggctaatcttaatgatgatgcatattcaaggattggagaggcacttcataaaattttagatgaatatgttaattcatggagaaataaaggaagtaagtcataaagaaaactaaaaagataactagtattaatttagttatctttttagttttattactgtttctttaactcaaaaagtgctccacctaataaagcatagactttttcattatctgtaataaaaagagttgcagaatgatttgtcttttcaggctcagttatttttatatatttaattttatcacctgaaataccaagatttttgaaagtatcattataagtgttataaaattctgtagctgtaattgttccttcattaatagttggatcagatacagctccgtaaattgaggaaatcttatctttctctatagtaaatttttgacctatacatagagaaagagtagactcacttaaagtagtttttatattggaaggtatatgcttttcaatagtccaagtaccatatagactttcataatatgaagagtcttggccttcattatttgataaatcactattgcccttgggtggattgctattggaatatctgaaaaaagaaaaagcagatatgattactataaacaatattattaccaatatatataagctttttgatttagagtttttcatttttgtgatcctccttacgatagtttattgtatagtttttttcacattaaaaaaataattctaatttattgataaaaataatttaaatttctaatttatttttgtaaagaggatacaacctactgcttagaacattcagcgatatttccatagcttttcggaatcaaaatatatatgatttccataagttatcacataaatctagtttcaaagttgtttatctatatctaagcagttaaagattaatttaccaagaaaattgtatactataaatgcatcttttttaaacaatcttctagccattctatgtatgatttttccctcatgatggccccgttcaatattatatagcccccgaaatctgaagaggatactgttaaaatgtcttttgcctttaaaagctcatccattgaattttcaaggtattccaatctttcaatgtgtttagttagcgtgtttttaaactgctttattaaagtatcgtgatccatctcatcacaaaaataagctttaagtttaaaaatatcctttggagttggctctaaaggatcgtcttttgagagccatttctgcaatgattttcgtcctttttcagttatagtatataactttttttctaatttttctccttgtataacagtctcataggaaattagcccttcagcggttaatttctttaattcggggtatatttgactatgcttagcataccaaaattcaactaaaccagaattaaattcttttgttatatcatatccggttaaaggatttctattaataagtcctaaaatagcatattttaaagttctcatacatgcacctctaatatttctgtagcttatttgcttgagtttatccaatgacaattttagcatagtaaaatataaagtgaaatagaaaaatattaactgttaaacatgtcaatattgacatgtttattttttcggtattataatatagttgaataaggaaattaatgtaatcagataattaaacgtttaaatattataggaggaaatttatgaataagtataaaaagctatttgaacctattaaaattggtaaatgtgagataaaaaatcgttttgcattagcgccaatgggaccacttggactagctgatagcgaaggtggatttaatcaaaggggaattgactactatactgaaagagctaaaggtgggacaggcctaattatcactggagttacttttgtagataatgaagtggaagaacatggtatgccaagtactccatgtcctacacataatccagtacattttgttagaacaagcaaagaaatgactgaaaggatacatgcatataatgcaaaagtatttttacaaatgtcaggtggatttggaagggttacaattcctactaatcttggagaatatccaccagttgcaccatcagcaattcaacatagatggcttgataaaatatgtcgtgaacttacaatagatgaaattaaatctatagttaaaaagtttggagatggggcttataacgcaaagagagcaggatttgatggtgtacaaattcatgctgtacatgaaggttatttaatagatcaatttgctatttcattatttaatcatagaactgatgaatatggtggaagcctagaaaatagacttagatttgcacgtgaaatagtagaagaaattaaagatagatgtggagaggatttccctgtaactcttagatattctccaaagagttttattaaagatttaagagatggagcacttccaggagaagaatttattgaaaaaggaagagatttagaagaaggtattgaagctgctaagttacttgtatcctatggatatgattcattagatatagacgttggatcttatgattcatggtggtggagtcacccaccaatgtatcaagaaaaggggttatacagaccatatgctaaattaatgaaagaaactgttgatgttccagtaatatgtgctggaagaatggacaatcctgatatggctattgaggcaattgaaaatggaacttgtgatattgtgagtcttggaaggccacttcttgcagatcctgattatgtaaataaattaagggcaaataagtgtaattcaattagaccttgtatatcatgtcaagaaggatgtatgggacgtcttcaaaattatgctatgcttaactgtgcagtaaatccacaagcatgtaaagaaaaggacaatgcattaactcctatattaggaaagaaaaaagtacttatagttggtggtggagttgcaggttgtgaagttgcaagagttttagctcttagagggcatgaaccagtactttatgaaaagactgatagattaggtggaaatcttataccaggaggttcgccagactttaaagaagatgatattgcattagcgaactggtatgcaaacacattgaaggaactaaatgtggaagttaatttaaatagtgaaattacaaaagaacaaatactaagttataaagcagattctgtgataatagcaacaggatctactcctaaagtattttcattgggagatgatgagaaagtatttacagcagcagatgtattattaggaaagaaagagtcaggtaataatactgtagtagttggtggtggattagttggctgtgaattagcacttgatctagctaagaagggtaagaaagttactatagtagaagcattgcataagattcttgcactaaatggtcctttgtgttctgcaaacagtgaaatgcttgaaagattaataccatttaacggtattgaagtaaaagtaaattcaaaagttaaagcttataaggatggaaatcttgagatagaaacagaaaatggagtagaaaaaattaaatgtgattcagtaatactttcagtaggatataaagaggaaaattctttatatagagaattggaatttgagattccagaaatctatcttttaggagatgcacgtaaggtttcaaatattatgtatgctatctgggatgcatatgaagtcgcaaatcatatataattgatttaatgtcggtaaagtgtcatataagctacttatatggcactttatatttagaaggttttttatatagtatttcaggagtaaattttatttacaaaatcaatattgtaagatatgtataggaattataaaaagacagtgaatttgtgtttataaatttactgccttttttagtatagaatgtaaaaataaaaagtgatattataatgatattggaactgatttacaatattagaaggttagtttcttagtaagaaaggaatattgagaatggaaaatttactaaaaagaaaaaagaatatatcaattaaaactaagtttataacaagtggattactacttggattcagcatccttttatttgcaatggcacgatatatatatggattttcaaatttctattacaagtatatttattcaatattggtaaatacgctttcaagatgtttgtcattaataccattttcagtatacgaaataatattatatgctttccttatatatattcttgtaagaatagtaaattatacatatttacttttttcaaaacaactttcattaaaaaaaaataataatcagagtaacttcaaatgtgcttatatatatatcagcatttgtatttttaaatataatgactctagggataaactcattcagatcaaattttgttgaattaactggattaaaagtgcaggataattcagaagaaaaactaatagaactttgtgattatctaaaagttagactaaatgaattagatggaaagataaaaaggggtgaagatggactattaaagctagattatgatgcaagaaaagaaggaataatcagtatggaacgtataggagaaatttatccatctttgcaaggtttttatccaaatccaaagccagttgttttttcaaaacttatgtcatatcaattgttggagggagaaacaacttttacccttgaagctaattataataatgatatgcccagatggaatgttccaagtacaatttgtcatgaattgagccatgtaagaggttttaatagtgaagatgaggcaaattatataagttttctagcatgcgataactctaaaaattatgaataccaatatagtggataccttatggcgtattcttactgtatgaatgacttatattatttcaatcaagaggcttttaaaagaataaataatgaactttcagataatgtaaaattagaattaaaaaatgattcactatactggaacaattacagaggtaaaatatcaaagctgtatgataatgtatatgataagatactaaaagctggtggccaaacagaaggaattaaaagttataacgctgtcgtgaaactactaatatcaggatataaagtacaattttaataaaaaatgaccaaggagataaactttcctttggtcatttatttttttgctttttctctttttcttttccatttccattaccgttaccattgccattattattgctattattttttttcgtttctggggcaggttgagtaactttttgtccttggcttataatcaaatctatctttccacttttttcataagatgtaccaacagtaggagattgacttataactaggccgcttgatacattatcgctgtattcataactgatatttccaagtaaaaattcattattatttataatagattcagcagtatcttgagattttccaactaatagtggtacttgccttttttcacttggttgcaatttgtcattattctctttactagtggttcctaaagtattttcttcaatgctgctatttataggagaatccttatatcctgtatttttagataatcctccatagaaatacttacctaaggcaaaggcagcaatacaaaaagcaattaccccaattggtaaaataacttttttggatttactttttaggttgtttatatgtaacttattagtgacgctctttaatagcacagtttcttgtattggctctttgctcataaccacagtgggatcaatttctttatgtgtatcaatcatgacagttgaatcatctattaatgtgttattaaagtctatttttaatttaggattttcttttagtgaacttaaaacattagcgaattctttggctgatttaaatctatcggctggatttttttctaaggcttttagaattactaaattaatgttctcaggtatatctgcaataaaattctttggcggaataacaggttcttgtatatgcataattgctactgaaatagacgtttttccattaaaaggaacatttccagtaatcatttcatacatgacaataccaagagcatagatgtcagttctgaaatcaacatatcctcccttagcctgttctggtgaaaagtagtgtactgagcctataattttatttgaatttgttattgttgaagaatttggaagttttgcaattccgaagtctgttaattttgcaatgttatcatctgaaattaaaatattatcgcactttatatctctatgaattatattatttttatgggcgtatattaaagcttcagccatttgtaaagatatatttaaggtagtatcagggctgagtcgtacattatcccttaatacttgttttaatgttttaccattaatatattccataacaataaaattaatattattctctgagccaatatcataaatatttactatatttggatgtgataaacttgcaattgaatttgcctctctcttaaatctgagaataaattcttcattattgcttaattctgattttaatatttttacagctacaaatctatttaataaatggcattttgctttatagacaattcccatgccaccttcacctattttttcaagcaactcatacctgtttataagtaatgttccaatcatatatgtccccctaaaacagttgtatatctattatatcataactaattttatatttgttttcaaataatagcaaagaaaaaagaagattattacaggaaatatcattttattttaattgatgattttattttataggaaaaaatgtcgttttctttcacataaatatttattagagaatatattataaacataggaagcgcattaaatattttcattgaaaattcgttgctgataaagcattgcatatgtgcattaaaagcgttttaaagatactcatttgattttggagaacatatatcaacttattctttatgttgaagatatattttaatgatatatgtaactataaaaaatttaaaatgaccaagtcaatataagtaacttttatttcattttgagtttatatgcaaggagttgtatagaatggaaagatatgaaaataaatgtaagtgtactaagcatgactgcgaattatgtagtacaatcaaatcaaaaccagttaatttggaaaagcatggtgcaaaattagtaacagtaaaaataaaagtcaataatgtttgcttaggcaaaaaagtagctattgcagctattttatatgatgattgtgatagaatacttgcattcaaaggatttgtaacaatggcacaggaagatccttgtgatcgtgatgcatgtggaactatcgaacgtaaaatagtgttcgtaattccagatcatgaagaatgtgatccagaaagattgagagttcgtaccataggaaattatatatatccatgtgaacccaataaataggtaattataaaaaagcaattgtgggataagtaaatgaagcaaccctgcagttgctttttagtataaagatttaaaaaagatatttagatattcaagatttaggaataatagtttaaacatagtgaaaaaataccactgaataaaattataaaaggaggtattttttatgaagatagaaggttactttagtggtataaaagctgctaatcaagctgtagaagcattaaataaaataggtataaaagatgctgtggcagatataaatgatcattatacaaatgataatccagggcaaaacaggccaggcactgaaagcagtacaaatagtttggcaaatttaatactatctaacgacaatcctacggttgattcgggttacgggccaatggcagctgcaaatccaatggtaagcggtatgggcggttttgaagaaatagctgatgtaaattataaggtgattgtaaatacagatgaaaataatgccgaaagagcaaaacaaattatagctaaagctggtggagagttagacgatcctaattttatagttcctagtgggctagagaatataggaatggatgatctagtcaccaatatgataaatgaaatgaataacatcacactctaaaggttcttacatagaaagataaaaatctaagacttagaatgttggtaatattttaaataatatcatttattttaatataaaactttaagagtgtattttttataatgcaatatcttaaatttagtttagtaatataattttaacttatatgtgttcagtaataaatttttatttgaagccgtgataggttacgtattcaattgatactaacttcttgtaagatgaatttactcttgcaatcaagaagttagtttttcattttacaattttattcatatatttctcttgacttagagctgtctcgaaggagtaatatattattaaagaacttaatactaaattagaaataaggaagtgcattaataatgaagaattttgaattttatgctcctacgagagtgatttttggaaaggattcagaaaaacagatcggcactattataaagaatcaaaattgtaagaaagtcctagttcattttggtggaagcagtgcgaaaaagtctgggcttttggataaaatttttgaatctttaaagaaagctgaaatcgattatgttagcttaggtggagttgtacctaatcctagactttcaaaagtatatgaaggaatcaatttgtgcaaaaaggaaaaggtggattttatattagctgttggaggaggcagtgttattgattcagcaaaagcaataggatatggcatagctaatgagtgtgatgtatgggatatatatagtaaaaaagttattccaactggctgcttacctgttggggcagttttaactattgcagctgcaggaagtgaaatgagcaattcatcagttattacaaatgaagaaggatggctgaaaagaggatgtaattctgagtatgcacgttgtaaatttgcaattatgaatccggaacttacttatacattacctaaatatcagactgccagtggagctactgatatattaatgcatactatggaacgttattttacaaaagaacagagcatggagataacagatagaattagcgaaggattaatgagaacagtgattcataatgtaaaaatattaatgaaaaatccaaaagattataatgcacgtgctgaagtaatgtgggcaggaagtctttcgcataatgatttaactggatgtggttcagttggcgattggtcatgtcatcaattagaacatgaacttggaggtgtgtttgatgttgcccacggagctggtttggcagcagtttggggaagctgggctaggtatgtgtacaaaagtaatataagccgttttgtacaattcgctgtaaacgtaatgggaataaccaatgacttttataatccagaaaaagttgcattagagggaatagaagcaatggaaagtttttatcattctattgatatgccaatatcaataaaagaacttggagttaatttgacagatgatcaaattgatgaactagcttataaatgtagtttcaaagatactagaaccataggggaattccaaaaacttaatatggaagacatgaaaaaaatttatataatggctagataaaaattatttcaggaattatagtcagtgttataaatttttaaagagccaaaaagtagacaagatcagctttttggctcttttatatgttaataggtggtgataaatttttagagaatttgatcagtaaacatgataagactcaacttagacaaaaaattgaatacaatatataacagataactattttaaaggagaataaaatgaaggttataattataggtggaggatgggcagggtgctctgccgcattagaagcagtaaaattaggtgcagaagttgagttatatgagagaactgacttgctacttggagtaggaaatgttggtgggataatgaggaataatggaagatatactgctgcagaagagctgataaatcttggcgcaggtgatttcataagaattatggattcaatagcaattcataagaatatagatttcccagaacacaaacatgcatggctatgtgatataggtaaagctgaacctattgttcgaagatatttaatagaatgtggagttaaaatatttttgcaaagtagaacaatagatgtaaatatggaaggcaataaaataaaatcattagtattatttaataaagatattgtaactggagatgtatttgtagaaactacaggttcaacaggatcaatgcctaattgtgtgaagtatggaaatggatgcgttatgtgtacattaagatgtcctagctttggtgcaagagttagtataagcagtaaagcaggagtaaatgacttagtaggagaaagagcaaatggaatgaagggtgcaatgagcggatcttgtgaatttcctagagaatctttatcaaaagacataataaaagaattagagaaaaatggagttgtagttattcctatacctaaggaagatatacatttagaaaagttagaacaaaaggtatgtcagcaatatgcgactttagaatttgcagagaatattatattattagatacaggacgcgtaaagcttatgacatctcactatccactagataaattaaggaaaataaaaggattagaaaatgtagtttatatagatccactagttggaggtaatggtaattcaattagatatttatgtgctgcgcctagatataattcaatgcaagtaaatggcgttgaaaatttattttgtggaggtgaaaaaagtggattctttgtaggtcatactgaggctatgactacagggactttagcaggttataatgcagttcagtatttggagaaaaagcctttattagaattgccaagagagcttgctacaggcgatattattgcatatgcaaatgacaaagttaaggaaggaaaaatgagtgaaagatatacattttcaggagcagaatattttgaaaggatgaaagatttaggattgtatagcataaataatgatgaaataagatcaagagttaaaaaactaaatttaacaaatgtattttcaaagcaatgtaaaaactaagtttctataattaaaaatattaaatttggggagcttttattagcttcccaataattatgaatgaaaataagaatataaattctatgaattcatgttataataaatataaaatatggtaatgtacataaagatttatttttaaggaataataacgcaatattaagtaaaaataaataagtaattattaataataattatgtcctaaataaagagagagaccttatttaattaaaacgttatatctaattggtttaatacattgttatggaggatattatgaaaagtgtagaaaaaggaaaaaaactatttttatccatggtaatagcaatattagctgtaagtatagttacaactgcagttagctattttatgcaaggaaacataggaataatttcgggactaactaggactgtagtagaagctattctcttatattttatatttaaaggaaaagcttgggctaagattataatgatagttttgcttataattgtcattttagcggcagttgcagcaattatgatttcgcctaatataatgattactattttaatgatagtgtatatctttagcgtatatattataggaatatcgccgagtgctaaagaatatttaaagtcaattaataataagtaaagcaataaaataaagaggtattttgatttttatcaaagtgcctctttatttattgctctaagtaatatgggtagaatacatccgaatcattttatagcaaatagtactaattgtaaaaccaacttaactttattaagtttctgtttataaataaataatataaataagtttttatattatttaataaaatttaattaaaataaaatcatgatataatgggcataaaacttttatagttttatataaaattggggtgataatatgtcaattactgtgggaaaattatttggaaacggggctgttttgtatcaaatgaaactgctagcaggacagaaaggtcttaataatctagtggaatgggtacatattattgaaaatgatgaggtaagtgaatttcttcatggaaatgaagttgtccttacctcaggcattctaaatgatggtgatggatggttgttagaatatacaaaaaaactatatgctgctcggacaagcgcttttgttgtaaatattgggccatacaccaagtcaatacctaacgatgttatagcgtattgtaaccaagtaaaaatgcctctttatactattccatgggaaacaagaatggtagatttaacacggaatatatgctatcgaataatgcaaagtgagcaagtagaaataagtatagcaagtacgattaagaatattatatttaaaacaggtgatatagaaacattaattttacagatggagagatatggatatttgagagacagtcatttttgctttatagtcatgtcatttgaacataaagaagacaatcaattagaatttgatatgaataaaattaaaatgtattcagaaagattagctagaagtattcatgaattatatatttcattttcatataaagattcttgggtactggctcttgtgaattatggaaattacgatgtcactaattttgttgatactttttttaagaactggaatgaacattcatggaaggttcatatgggaataagtgaaaataaagcaggcattaaaatgcaggcggagaattttaataatgctttcacagcaatgacgatggcccaaaaacaaggcaaagaaatggtgttttatgataaattagatattcataaattgcttttaaatgctaaggataaagaagtgcttaaagaatattataaggatactctaggtaagctagaaaaatatgataaggaaaataacactgatttaatgagcttcttatatatgtttttacagaacaacggtagtcaaagccttgttgctgagaaacaatatattcataggaatacagtaaataatcagcttaaaaagattgaaaagattactggatataatccatcaaatttagaagaaaaactacgattttatttaggtttttttgtgaaggatgttatgtaaatgtgcagttgcacaaataaacttagtcacttattcattgatataacagttttactagtatataataaaaacaacttaaagaaaaaacgaatttaatagagataacagcaacggagcttgttcacttgaataagttccgttttttatttgaggaaaatattaaatgtatataggggagtgtataaagatgaatggtgaagaaattaggagtactttaaaagaatataatttacaatcatggagcaaacaaagaaatttaaatccaatttcagttgaaagagcagatggtatttacttttgggattatgatggaaatagatattcagatatgtcgtcacaacttgttaatatgaatttaggttttggaaataaagcgattggagatgcaataaaagaacaagtagataaatattgttttgtagggccatcttatggagctgaatctagagccaagcttgcaaagaagatcattgaattaatgcctgataatatggggaaggtattttttacaaatgcaggtgcagaatcaaatgagaatgctgtaaagatagcaagaatgtttacaggtaagacaaaggtgttcagtcgttatagaagttaccacggatcttcgtttggtgctggtaatttaactggtgaacctagaagatatcaattagaacctggtattccagggttcgtaaaattctttgatccatatatttatagagaaccaatagaattcgaatcagaagaagccgcaacaaaatattacttggccaagctaagagaacaaataatttatgaaggacctgatagcgtagctgcaatagttttagagactataacaggttcaaatggagttatcattccgccaagaggatatcttccaggagttagaactttatgtgatgaatttaaaatcttaatgatttgtgatgaagttatgacaggctggggcagaacaggtagaatgtttggttttgagaattttgatgtaaaaccagatatagtaacttttgcaaaaggtgttacttgtggatatgttcaacttggtggagttgtagtaagtaaagaaatagcagcttactttgatgataatttattatcttgcggactaacttatagtggacatcccctagcttgtgcagcaggtgtagcgtgtataaactattatgaagaagcaggtatactaaaaaatgttaacgaagtaggtagtgtacttggtgaaaaactagaagagatgaaagcttctcacccatcagttggagatgtgagatatattggattattttcagcagtagaattagtaaaggataaaggaagcaaggaacccttagtaccatatggaaaggatccggaaggagttatggggaaaattctaggattattaaaggaaagaaagtttatgacatatactcatgagaacatgatacttgttgctcctccattaataattacaaaggagcagttagaagaggaactatctaaattagacgaagtacttggaattgtagacaaacaatttatctagatgaggtgagaaaatggcatatgaatttagtttaccaggacgtacgattattggagataatgcattagaatcaagtgaaaatttgatgaaatcctttggaaaaaaagcatttattgtatctggaaaaaatgtaactagaattggaacagttaaagttttgacagactgtttaaataattggggaattggatatgaaattttcaatgatatcattggagagcctactgatataatgattgaaagtggcgtaaaagtttataaaaatgctgaatgtgatttctgtattgccatcggaggagggagtccattagatagcggtaaagcaattgttgctatgacaaaattagaaggttcaatatctgattacatgggaaaaacaattgaaggagattttccaccattggttttgattccaactacagcagggacaggttcagaagctaccaaatttacggttattacagattcaaagaggaatataaaaatgcttctaaagggagaagcattactacctgatttggcagtgattgattccaaattctcaatgacatcacctaaaagcgtaacagcggcaacgggcatggatgcgttaactcatgcagtagaagcgtatacatcaagaaaagcaaattcactaacagatacctttgcattatctgcaatcaaaagaatttttgagtttttaccattggtttataaagatggtgaaaataaaaaggctagagaagaaatggccattgctgcatatgaagctggtgtatgtataaataattcttcagttaccttggtacatggcatgagcagaccaattggagctaattttcatgttgctcatggaatttcaaatgctatgcttataaaggaatgcttatcttatgttttagatggaagctatgaacgttttggtacaataggtagagcaattaatgcagcagacgataagaaaagtgataaggaagcagcagaagcttttctagaaaaattaacagagttatgtaacatatgtgaaataccaactttaaaagagtatggaattaataaagaagaattcaatagagtcgtagataagatggcgcaagatgctattaacagtggaagtccatcaaatactataaaagaagttaaaaaggaagacttattaattatatacagtaagttatggtgaatatgaagtgattgcaacggtgcaaaacaaatagttttgtaccgttttttgtttaaaaggaggcgtaaatcaatgagtatgttaaatgaaatagatacagaatttgaaagcagaaatgcttttaggacgaaagaagaaaaagtagaaattaaaattgaagatttaagtatggtttaccaagataagaatggtggagaaccagtaacagcgcttaagaatgttaatttagaaatcaaagaaggagaatttatttcattactaggtccttctggttgtggaaagacaacattacttcgtattatagctgatctattgcaaccttcttcaggaaaagtgatagtacgaggacaaagcccaagagaaataagacttcaaaagaaatatggcatagtatttcagaatccagttctatacgattggagaacagtaagaagaaatgtttgtatgccaatggagcttctaggaatgaagaagcaggatcgtacttcaagagttacggaaatgcttgatctagttggacttactaactttggtacgcattatccttatgaattaagtggagggatgcagcaaagggttggtatagcaagagcattagccattaatccggaaatacttcttatggatgaaccattctcagctttagatgaatttacacgtgaaaagcttcatgaagatcttttagaaatatggacaaagaccaaaaagacagtagtttttgtaacccataatatttcagaagcagtatttttatcggataaagttgtggttttatctccacatccaggacgtgtttctgctgtgattgatattgacataccaagaccaagaaatatggagtcaaaacaatcaaaacaattttatgattatataaccaaaataagaaatagctttgagggggtatgattatgattagcaggaaagagaaatataaagttaatctagtttgggctataggaatttttatagcttgggaattagtagctttctttctagaacaagtgatgcatgatccaatggctggagcaaaacttccttatccacatagtgtcatcatatcaatagcagaaaatttcactgatttaatgagcgcggctggacttactttttcaagagctgtatttgggtttgcacttggagctgcaataggatttgttttagcaataattatgagtttatcgaaaatagcagaaaaaatatcattaccttatttaataatatcacaaatgatacctgttttagggttagctcctataatctttactttagtcagggatatgaatacttctaggatagtaattgcagcatatatcacatttttcccagtttcagtaaatatgcttagtggattaaatagtgtagaaagcgataaaaaagaattgctatactcatatgctgcaaaaaagaaaagcatatattataagcttatgattccatattcaatgccatatttatttgctggtttaaaaatagcggcaccaatgtcaataacagcatctatattagttgacatgttaggttcaagcggcggaattggagtgaaacttttatactcgttatactcaggaacaaaagatgtattctggggatcagtagttaccagcgctttaatggggattttgagttattttatagtaatactattcgaaaaaatttgtatgccttggagaaagcagactacatagggaggtaattttatgaatgaaaaaattaaaaatgttttatggcctttaggttttgggatattaataataatcgcatggcaagttggtatcattcatgatgcattaggttttaagccctttcaattaccagtaccatcacaaattattaaaactttaagtgacaatttttctaaagctctaactgacacgatgattacagtttcaggggcattggtaggacttgctttaggatgcataattggatttattgtcgcagtgatagctacgcagtttccaaagtggggatatacaggacttagtgtaatagcagcatttaatgcaattccaatagttgcattatcgcccattatgaatcgttggtttacaagtggttttgcacaaaaagttggtgttgtaacggttgtatgtatggcagctatggcaattaactcctataggggattaaatgatttaaaaccatttgcaaaagatttattagagtcatatgcagcaccagaaaaaattatatttttcaagcttcgtttacctaattgtcttccgagtgttttaactgcattaaaaattaatgtggcagcagcaataatggcggctatgataagtgaatactttgcagcatcaacttcaggtattggttttggaattaaagataatttaagaaaaggaatgatggccatggggtggtcctatatagtaatggcagcattagttgggattgttttatacttaattattttattaatagaacgtagaaccataaaatggcatgcgtcacaaagataataccaactttaaaatagaaaagtttagttcaacctaatatactgtttgctttataagtaaaattgaaagtcaccgatatctcttagaacttcaagagaacacacagatggcatgtataagataaataatatttatttaataaggaggaatttattatgaaaaagaagttattagctttagggttagctgtattaatgatggggacgatgcttataggatgtggatcaaaaacatcagaaacaacagcgaaagatgcaactaaatcagaggatactacaaagaaggatggggagttagaaaaagtaacacttcaattaaaatggcttccgcaatcacaatttatgggatattacgtagcagcagcaaaagggtactataaagatgaaggaatagatattcaaattcttccaggaggaagtgacattattccagaacaaaatgtttataatggtgtagccaatataggggtaacttgggtttcaagtttaatgacttaccaagctcaagggtatgatttacaagaaatcgctcaagtatttcaaaaatcaggtatgttattagtatctaaaaaagaaaaaggtattaattcgccaaaagatttagctggtaagaaagtaggtaactggtttggtggcaatgaatatgaacttcttgcactactttcaaaatacaatttagataaagaaaaagacctaaaacttgtacaacaagactttacaatggatcaattaaaagaaggatcagttgatgcagcatcagcgatgacttataacgaatttggtttattacttgaaggcggcatgaagaaagaggatttaaatgtaattgatatgaacaatgaaagtgttgcaatgatggaagattgtttatttgtaaactctgaatgggcaggtaagaataaagatttattagttcgtttcttaaaggcatctataaaggggtggaaagatgcagtccaagatccagaagcagcaggaaaaacagtttatgatgtagataaatcagtttcattagatcaccaagtttatatggcgaaagaagttgctaaacttgtagcacctcaaggatttgatacttcaaaaattggacaaatagatatgaatgcaattaagcaaacaggggatttcttaaaactttataataaagatttagctaaaactccagtggtagacgatacaacattcacttcaaagtattgggaagaagcaacaaaataatatgataaaaattgattcatgtgtggttaaatccacacagaatcatcttaaaatttatataacaaaaatttcaatttaagaaagtaatttatcacaaaagaactaatttattaaaaatacaaatatattaggaagcttaaatcaaaagtacaacaaaaggcagaagtattaaagagaaaattattaactaaattagttatttagatattaaggatatatatgaatgagaggagaatacttatggatttaattattaagaatggaactattgtaacaccattagaatcttatgtagctgaccttgctgtaaaaggtggaaagattgtagcgattggaacaggtttttcagaagaaggtgcaagtgttgtagatgctaaaagtaagttaatattaccaggggctatagacgcacatactcatttagctatgccgtttggaggtactgtttcagctgacagctatcttgccggaacacgggcagctgcttgcggaggtgttacaacagtatttgattatccaatgcaaagaaaaggcaacggaataattgaaaccattgaaacaagaaaagaaatgtgtgatccagaggcgtgcgtagattatgcatttcattgtatcataactgatttaaatgaaggaactatcttagatgaatttgaagatgcggttgaatatggagtacctagttttaaatgtttcttagtttataaaaaagaggggatgatggtggatgatgcgactttagtgaaaatactattgaaggctaaagaaactggggcgatgacaaacatccatgctgaaaatcccgatttgattgatttaaatattgaaaacttcttaaaagaaggaaaaacttcagcatggtatcactacttaagcagaccagaatttgttgaagctgaggcagataaaagggcagtgcatttagctaaatccataggagcgccactatatttagttcatatggcagacaaggaaggattagaaactgctattgaagccaaaagagaaggtcatgatatatatgttgaaacatgcccacaatatttggaatttacgtgcgatgtttataaaagagaagatggcagaaattttgtatgttcaccaccaatgaaagggcaagaaagtcaagatgcactttggaaagctattaaatcaggagatattgatactgtagctacggaccactgcccattccaaagctatgaaaaggactggggaaaagatgattttacgaagattccaaatgggtgtgcaggtgtagaaaatttatatccatatatgctttcagcagcaaatgaaggaaaaataacttttaatagagcggtagaattatgttcatttaatccagctaaaatatttggatgtacagaaaaaggttctctaacagttggaaaagatgcagacattgtaatttatgatccaaataaagacttcacaatttcggtagagaatatgcattcagattatgatcatacaatttgggaaggaaaaactcttcatggatatccagttcaaacctatgtgcgtgggaatttagtttatgataatggtgaattcgttggaaaagcgggatttggacaatttgtgaaacgagtaggaagaaagtaaataggaacttggcttaggtgatatttagtgcctggactgtagttcaagttatctaggattatgatactgttatctacagattaagaataatgagagttatagtggctaaacatcagataagcgataatttaggaggaatggaaatgagtagtttattttataaagatatttcaacaaatgaatatgtgtcagggtgtttgttgtgcgatgaagcaccttgtcgcaaagcttgtccccactccattgaagtggatactattatccgttctttaaggtttgaaaataaggctggggcagtaaataaactgcccaatctacttccttgtgacacatgtgaagaaaagccatgtaaggaggcttgcttaaaagggaaaattaatgaatcagtaccaattgacaaagttatgaaagcaatatcaactgaatctagagttaaagaaaatgaagttgatttagaaatagacttctgtggggtgaagtgtgaaaatccatttttcctttcatcatcagtagttggaagtaattacgaaatggtagctaaagcatttgaaatgggctgggcaggggtagcatttaagactattggaatgtttgtaccaaaggaggtttcaccaaggtttactgctttaagtaaagaaagtgttccatttgttggtttcaaaaatatagagcagatttcggatcacacattggaagagaatataggatttttaaaaagattgaaaaaagactatccaagcaaaattattgttgcatcaatcatggggcaaaacgaagaagaatggactaaattggccaagctaatgacagaggcaggagcagacattattgaatgtaatttctcatgcccgcatatgacaagtaaaggcgtaggttcagatgttggacaaaatccagatctggtagcactatatactaaagctactagaaagggaacaaatttacctatacttgcaaagatgacacctaatattggaaatgtggaaataccagcaatggctgcaatggaggcaggagcaacaggtattgcagcaattaatacaattaagagtattatgaatctaaacctagaaaactttgaatcggaacctaatgttgaaggtaagactagtgtaggaggatactcaggaaaagcagtaaaaccaattgctttacgctttattcatgatatgaaagcttgtgaagaactaaaagatgcgccaataagtgggatgggcggtattgaaacatggaaagatgcagctgaatttatggccttaggatgtgaaaatttgcaaataacaacgtctgtaatgcaatatggctatagaattatcgatgatttaattaatgggatgaaattgtacttaagttcacaaggctataaaaatatatctgaaattgttggtagtgctttacctaatattgtgccaacagataaacttgatagagacagtatttgttatccaaggtttgataggcaaaagtgcataggatgtggacgatgttacttatcatgttatgatggtgggcatcaagcaattaaggtggacataaatacaagaatgccaatcttgttagtagataaatgtgtaggctgtcaattatgcagtactgtatgtcctgcaagagcagtagaaccaggaaagagagtgaaaaaataattactatactaaatttaaagggggatattcatatgttaacttgtaataaagaaaggcttcaagacaaaatcacaacatttagtaaattcggagatacaggtaaaggaggaatcacaaggttgtctttatcacctgctgctttagaagcaagagaagaattttgcaaaagatgtaaagcacttggtatggagataaaaaccgacgatatggcgaacatatacgcaaccattcctggagaggaaaagttacctgctattatgatgggatctcatgctgattcagttaaacaaggtggtaattatgatggtattttgggagttcttactggattagaagttgcagaaactatagtaactgaaaaaatagctcataaacatccaatcacagttgttatatggactaatgaagaaggggcacgctttgaaccagcaatgatgtcatcgggtgttattacaggaaaatttgataaagacgttatgttagcatctaaggatactgaaggagttacatttaaggaagcattagaagctagtggatatatgggaaaaatagaaaatcgaatgaatccagaaaaatacagggcactagttgaattacatgttgaacaaggacctgttttagaagatgaaaaaattgatataggagtagttgaaggtgtttgcggaatgataaattatgaatttacatttacaggtcaagcagatcatgctggaacaactccaatgaaatatagaaaagatgctctatatgcggctgtaaaaactattcaatatcttcatgatgaactagacaagcttgatagtaagctagtatatacaacaggaaagatttcagctcatccaaatatccatacggtaattcctgattatgttaaattcactttggatgcaaggcatcaagatccagaagtaattaatcaagttcttgaaataattaaggctattcctaaagttgttgaaaaatgtgaaacaagttatgaaaaagcttggtcaagaaatacagttcatttttattctgactttgtagattatgttgaaaaaaatgcaaaagaatttggatattcaacaaaaagaatgtatagtggtccgggacatgatgcacaatttattacagatatcattccaactacaatgatctttgttccaagtgaaaaggggcacagtcattgcgaaaaagaatttacaccacttgaaaactgtttaaagggtgcaaatgttttgttgaagacaatattagatattgataataattaatttttataacattaaataaaaacaatttcatggcataaacatcatgaaattgtttttatatttacaattaaaaaaagtataattgtactattttttactgatataacatttatatatgattgtttgttccaggttctgaaatatttttaagagcaacctcagcattatcctgtagatttggttcttgtgaaatatcaccaagagaaacgataccgataacactgttattttctacaataggtaatcttcttatttgatgtctgctcattagtcttactgcatcatgaacatccatatcaggacttcctgtaacaggatttgaagtcatataatcacatatcttttgttggtctgcacttgcacctgatgctacacaatccaaagcaatatctctatctgtaatcattccaactaatttgtttgagttatcacaaacaggtattgcgcccacgtcaaattgtctcatcatttgagcagctctttcaatagaatcttctgaatttaaactcactatatcttttgacattacatcttttatttgcataatgatcacctccaaaaatatatttccctatgaatatgttttttattattaaaagttcttagctaataaaaatttagaatgaatagatttatcgaaatatttatgttaattcttgaaataaaaaacgcagaaaaaacatctattttttaagagagatgaaatattattaaattttaattaataggataaagttaacatttaaaatgttataatattgtagagtaatattacttaatactttcacgctataaaaagtgaaaaagagaagtaggaggataaaatgaataaaattgtgtttcttaatgcaagcagaataaactttgatggacaacttgatttttcatcgctagataatttaggtaaagtgactaaatatgaagatagcagcaatgatgaaatcttagaacgggtaaaagaacaaaatattgtaattacaaaggaacttacaattaacaaggagttaatagaaaagtttccatccagtgttaaattaatttgtgaggctggtactgggtataataatattgacattatagcagcgagagaaaaaggtatatctgtatgcaatgtaccaggatatagcagcgaagcggttgcacaactagtaattacatttattctaaatttaagttcatcattagcgcaacagcaaagaatgattgaaaataaaaattacagtaattttactaaatatcttcaggttcctcatatagaaatacaaaataaaacacttggaattataggcgctggatctataggaatacaagtcatgaatgtagctaaagcattgggaatgaaaatacttatatacagtagaagctataaagatttaggcgattcaaacatcaaatttgtcagccttgaagaacttttaaaagaaagtgattttgttacaatacattgtccacttacaacagaaacaaggtaccttattgataagtccagattagatcttatgaaatcgtcatcatttattataaatacatctagaggagccattataaaggaaactgatttaattgaagctttgaataataaaaagattgcaggtgccgcacttgacgttcaagatccagaacctccagaattaaataatccactttttaacatggaaaatgtcattcttactccacatataggttggaaatgttttgagtctaggcaaaggcttataaatttattagcaaataatatagaagcttttattaagaacgaacctgttaatattattgtttaaaattaagtatcaagtaataaggatatttttgaatttacaatagattcactaggtcttatatgacaaaaaattatatcccagcaattagttaatactaattgttgggatatattctaattgtttatcgctatttagaaaattagtgaggccgtttgctcatttatttgctttacatattttaaccatctcaccatgatctccaatccagcatttaattccaggatattttgcattaagataatcatagaacaatataggattttcgctattattatcaaacatttcatagtgcccgggaacgaccaaattaggcttaatagttccagctaaatcaactgcttcttgataagttatatttcctattaaattttctctatatcttttcgcatcgcgcccattgataggaagaaacataatgtcaaagttattccactgtcttaattttgagaagataccatcatacatacaggtatcaccagaatggtatacagtacatccatttccctcaattatataacctaagtatggataatgcccggacgaatcttgatctagaaactcatgagctgaaggaattgcggatatttttaaatctttttctgaaatggataatccatcatccagacctataaatctatttttaggtatttttaagtcatctgaaagctcagtgataagaagctttggaactacaaattttgcgttgggcgaactaatagataattggtgccatacatctcgatcaatatggtcagaatgatcatgagtgccaattataaaatctgcatttacaatttcctctggctttaatagtggaggaatatttctattaggccaatcagatagaaatgcatctaaatagatagtagtttcagctatcttaatagcatatcccaactgtccaagccaccagaacgcaacatctcccttttctaaaatacattcatcaatatcttttatcaattcaattccagttttcataataacaccatcctttttgaaataattatatattaccacaagtggttcatattgtaattatttttttgaatagtaagaatttgagaatagaaaaaatatgttataattagagaaatagttttgagaaaataagataatgataggatgaacgaaaatgaatctaaaagaactaaataatgaagatattgaaattatctataatgaacatatgataaaagattttccgtatggggaattaaagcctcttgatgtaatacagaaacttaataaaagaaaaaattacatatgtataggtttgtataataataatgaacttctagcatacgcacttttagcttcatcaaaatcatatttgttaattgattactatgcggtatgtaaagaacatagagatgaaggaattggaagtgaatttttaaatatactacaggagcattttagaaattatgatggaattatagtagaagtagagagagtagaatgcggacctaatgaaagcgagaaaattattaggaaaagaagaattgacttttataaaagaaacgggatgagaatgacagatatttattgtaaattatttgatatagattattgcattatgtgtttatgtaatgtagatcttgatgatttggcaatttattcaggattaaaggatatatataaagaaataattccaggaagcttatattcaaaatatgttgaattgagttatgtatagttaaaatccttaaaatataaaaggtctatttttactagattaaataatagcaaaggcttattgaaaaatgtaattttaaaatatataataatgttattaaatagctatctaaatcaaagctgtaaaaaataaagataaattaattctttcaaaatggctatgaagtctaatttttatactaaaaaagtatatgaattaggctttttttattccttgagaaaattatattccaataaaatttgtggataatttaaaaaaagttgattgattagttcttgtattttaaaaagaataaaaaagaaatcttattcgcctgccaaatttttctcacatgcgttcgaaaaggcagatgcgtgaaaaaatctcaggctccacagtcgcctgcgattttgttctttctgttaattaaaaagatcaaattcttttgtaactaaaaataaaatttattacaaaagaatttacagaaatcaagttataaatatggaggtatttatggttaatgaaatagcagtttgtgtaaatgattttggagaggttactgaatatgagaaaaccaaatttattaaggttttttcaaagcatggaaatgaatggagagtggttaaagaattagtatttgaattttgttatacaaaggatagtaaagaaatttatttagaagttttaaatattgcgcaggaactaggaaaatgcaaagttttcgttgctaagaatttttcggattttgtgcatactacattagataaaatggggttgagtttgtggaatatggatggaaatccaatatgttttttggagtatatattagaaaaagaaaaagaggaggaaaaagtaagtaaatttataaatcattcagatataagtaataataggcaatttattatctcattaggtaatgggggatgtgggcgttatatattaaatcttaagaatttgcagaaggataatataggtattacgtctaagcaagctttgaagccatttctaaatagaaaaatttttaatgagctaataatagcctgcagtcatattccaaattggttagaggaagatttaacaaaattgaatcttaaatttcagttttcaaagattggagaaagtgattatattgttgtaataaataattatgatgggtattaggatttagattctagattcagtattaaatgcaaggaggaaaaaatagtggatattgaagtgcgtaataatagaaagataaatgtaagttctttttcaaaaattattgctgaacatttaaatattgatagtaacattataagaaattatatatttgctaatataagtataagtctaacgagaagcaaagaaatgaaaaaagatattgataaaatatattatgaggatagactgaaatattataatgcggctataaatgacacttgtataaattatactactataaagcaagcaaatattgaacaagaaatatattcacgtaggattgttggggtacttatagaaggggaaacggatagtatgctaagaagcaaaattattaaagttcttagaaagtattatccaattatatataatgctgtaaagaaacatgataagaaaatattgaaaaataggtacatgaaaatggatttaataactagaaatatagaagcaaaatttgatgcggcagtatatctatattttgctatttatatttcaccagaaatagtagatcaagggttcgtaatttctattctaaacgatattgaggagtttgaatctaaaaattttataaatcaaaatattgatatggagtttgataattataagaatagaataaaagaagttaggttgctaataaagcgaaagtttgggaagatatataattttaaagatatcttgagaaataataatgaagatgttagaaagttaggcgaaattttagaagatttgtttataatgaatgggattaatatagagagtatgtttgaagactcgcaatttatttgtattgagaaaattatactgccttatgtgaggatagtaaaaaatgaagactcagacataattttattttctattattagtggaatatttatgcaatcacttattaatgagtataagaaagcaagaaacttatattttaataatatggaggagtcaagtagctataaattaagcatattagaggagcagatgattgaagttaaaaaagaaaacattagcttaaaaaataaacttgattattttaacaaggaaaagttaatgtatgaaaagagattgaagtctgaattaagcaagctagatagcatatataaattagaaataaagaagaaggaagatcaaattagaattcttgagaacaaattaaatgaagaaaagattttaaaattggatttagaatatttaaaagaatatgagtttaattctgatactaatcacagaatttcggattctaacaaaagattagagaaatatactatcatcaaaaaaattattataattggcggagataaggaatggagaaggcgatttagaataaaatatccagaaataagaatgttaaatggtttcaacgaaaactttgatataagaattttaaatacagctgattacatatttttttatacccaatatatgaatcattcgacgtttcatagagctatggattttattaagcttaataaatgtaaatttggatatataggaaagacgaatatagatcttgtagagggagaaattatcgaaaaaatagttacatgcgaaggaaataatgaagagtatatatactagaaataattaaatttttatgtaacaaagaatttatgggtgagttataaattaattcataaaaaaatgaattaattaatttatgatatttagcaagtgttaaaggatgtagaaattatttttatacttattaggggataggttgggtatgtaatcagaaaatttgaattacaaaaaaaatattgggaaaaataattagaaccagattgaaggaggatagatgtatggaaaaaaacactaaggaatgtccaaattgcaagaaaaaaactgctaataattcaaagtcttgtagttcatgcggactaaatcttgatagtgatgaaaattatataagagctaaagaagaaactaataatggaaatgatagttttttgagcgagttaaacaaaatagcgggaggaagcgggaaagtagaattaagattaagagatctagttgttaatgtatttaaaaagcacacaccagaagagagagaaaatacatttatttgcggaacagcaaaaacatctcctaaggaaggcgagatatgttcaaagtggcctaagccttggctgttttcaagagttttttttctatttgcaataacttttgctggattagtagcgctgttaaaaattttcgagaatatattagcttatccaggaattatatttataggtgctttgataattccgttttcattacttattttcttttgggaggtaaatgctccaagaaatattaatatatttgatgtagtaaaaatattcttttttggaggtgttttttctttgttaataacaatgattctaagtagagtagtgtatgttagaaatgtagattacattggatcaataatgataggaattattgaagaatctgctaaattcattgttgttgcgtattttttaagaggaagtaaggaaaaatatattttaaatgggcttttgctaggtgcagcagtgggggcaggatttgcagtttttgaaacggctggatatgcgtttgcttatggatttcaaatacctacaatgatgaagataatatatactagaggaattttagcatttggaggtcatattgtctgggcagcaatgtatggagctgctttagttatggtaaaggaagataataggctaaaatttaaatatataacgaatataaaatttcttaaatattttattattgctgttgcgttacatgcggtttgggatatgccaataagtaatacgagtaatcttccaataatacaaggaattcttacaataattgcgtggattgttatattaatattaatcagtacagggttaaaacaaatttcaagtttaagttatagtaatagaatctaattccatcagatcatagtttatggaaataaaatttcaatatactagcttttaaagttgcaagcgatgttgcttataaactaaaatgttatttgttatataatttatgaagatgtctttcaggatataaagtttagtatggctatttcaatcatgtaacaactgagactagtgtatcaatataggtaaaaattagtatactcaagtatgatagcgaaaagtataaataattttataaaattggggaataatttaaaaagtaagttaaattaaagatgttaagataaaacacgtcgctaagacatataagcaaaaacaactcaagtttataagatacttgaattgtaaaattataagttttgtgaaaaatgttgacaatattaaatagcgatggtatgatttaattcattgctgaagattataaaattcaataacttaaagctaataaaacatctaagaaaaaatgtttgaaaagttttaaaaagggttgttgacaaagtctgaaagcgatgatatactgattaagctgtcagaaacgacagaaacttgtaagtcttataataacaggatttagaaggaaaaattggtctttgaaaattgaacagaataacataaatacatttaagtaaaccagcaatttttatttgagtaagctaagattaaactttttattgagagtttgatcctggctcaggacgaacgctggcggcgtgcttaacacatgcaagtcgagcgatgaagctccttcgggagtgaattagcggcggacgggtgagtaacacgtgggtaacctgcctcatagaggggaatagccttccgaaaggaagattaataccgcataagattgtagtgccgcatggcatagcaattaaaggagtaatccgctatgagatggacccgcgtcgcattagctagttggtgaggtaacggctcaccaaggcgacgatgcgtagccgacctgagagggtgatcggccacattgggactgagacacggcccagactcctacgggaggcagcagtggggaatattgcacaatgggggaaaccctgatgcagcaacgccgcgtgagtgatgacggtcttcggattgtaaagctctgtcttcagggacgataatgacggtacctgaggaggaagccacggctaactacgtgccagcagccgcggtaatacgtaggtggcaagcgttgtccggatttactgggcgtaaagggagcgtaggtggatatttaagtgggatgtgaaatactcgggcttaacctgggtgctgcattccaaactggatatctagagtgcaggagaggaaagtagaattcctagtgtagcggtgaaatgcgtagagattaggaagaataccagtggcgaaggcgactttctggactgtaactgacactgaggctcgaaagcgtggggagcaaacaggattagataccctggtagtccacgccgtaaacgatgaatactaggtgtaggggttgtcatgacctctgtgccgccgctaacgcattaagtattccgcctggggagtacggtcgcaagattaaaactcaaaggaattgacgggggcccgcacaagcagcggagcatgtggtttaattcgaagcaacgcgaagaaccttacctagacttgacatctcctgaattacccttaatcggggaagcccttcggggcaggaagacaggtggtgcatggttgtcgtcagctcgtgtcgtgagatgttgggttaagtcccgcaacgagcgcaacccttattgttagttgctaccatttagttgagcactctagcgagactgcccgggttaaccgggaggaaggtggggatgacgtcaaatcatcatgccccttatgtctagggctacacacgtgctacaatggctggtacaaagagatgctaaaccgcgaggtggagccaaactttaaaaccagtctcagttcggattgtaggctgaaactcgcctacatgaagctggagttgctagtaatcgcgaatcagaatgtcgcggtgaatacgttcccgggccttgtacacaccgcccgtcacaccatgagagttggcaatacccaaagttcgtgagctaacgcgcaagcggggcagcgacctaaggtagggtcagcgattggggtgaagtcgtaacaaggtagccgtaggagaacctgcggctggatcacctcctttctatggagaaatctagatcagcatgatgtctgactagtacagatacattattatgtatcaaaatataaaatacttgctcaaaggttacttaggtatttgttctgttcaattttgaaagactaagtctttcaaaatgcgtagcttagtagcaacaagtgcgaagaagcgaaaattttatgaaatgaagcgtacttcacgtacgtgaatgagtaaaatttggagctgatgaagcaattgaagttaataagcaagcagatgttctttgaaaattgcacatagatttaatgtatatataaaatacaacaaagccaagaataaatattctttgtgatatgactaataattaggtcaagctacaaagggcgcatggtgaatgccttggcatcaggagccgatgaaggacgcgataagctgcgataagcttcgggtagacgcacatagtcagagatccgaagatttccgaatgaggaaactcacatgggaaaccccatgtatcataaagtgaatacatagctttatgaaggtatacccagggaactgaaacatctaagtacctggaggaagagaaagaaaaatcgattttcttagtagtggcgagcgaaaaggaaagagcccaaaccagagatttatctctggggttgcggacagaacataacgagaaatcatagttaattgaacacaactggaaagttggaccacagtgggtaatagtcccgtaagtgaaaattatgataatcagttctgcaccagagtaccacgagacacgtgaaaccttgtgggaagcagggaggaccacctcccaaggctaaatactacctgatgaccgatagtgaagcagtaccgtgagggaaaggtgaaaagaaccccgggaggggagtgaaatagaacctgaaaccatgtgcctacaaccgatcagagcaccttatgtgtgtgatgatgtgctttttgtagaacgagccaacgagttacggtatgtagcgaggttaagtacttaaggtacggagccgaagggaaaccgagtcttaatagggcgactagttgcatgctgtagacccgaaaccgggtgacctatccatggccaggttgaagcgagggtaaaacctcgtggaggaccgaaccacgttgctgttgaaaaagcatgggatgagctgtggatagcggagaaattccaatcgaactcggatatagctggttctcctcgaaatagctttagggctagcgtcggaaaatgtgagtagtggaggtagagcactgaataggctagggggcatagcgcttaccgaaccttatcaaactccgaatgccacatactatcagtccggcagtcagactatgaaagataagttccatggtcaaaagggaaacagcccagatcgtcagctaaggtcccaaagtgtaagttaagtggaaaaggatgtgggatttctaagacaactaggatgttggcttagaagcagccactcattaaaagagtgcgtaatagctcactagtcaagagatcctgcgccgaaaatgtccggggctcaaacttaccaccgaagctacgggttcacgtttaacgtgagcggtagaggagcgtcgtaatcgggctgaagtcgtaccgtaaggagcggtggactgattacgagtgagaatgttggcattagtagcgagatgtaggcgagaatcctacaggccgaatatctaaggtttcctgagtaaagtttgtcttctcagggttagtcgggacctaaggcgaggccgaaaggcgtagtcgatggacaattggttgatattccaataccactataatcgttattatcgatggtgtgacggagaaggataggatgtgctagctattggatgctagtctaagcgtttagggagttgggattggcaaatccgttccaacaattctgaggcgtgatggggaaggttctacggaaccgaagtatctgattccatgcttccaagaaaagcatctagagagagaagtagtgcccgtaccgcaaaccgacacaggtagatgaggagagaatcctaaggccgacggaagaattgcagttaaggaactaggcaaattgaccccgtaacttcgggagaaggggtgcctgagaaatcaggccgcagagaataggcacaagcaactgtttaacaaaaacacaggtctctgctaaagcgaaagctgatgtataggggctgacgcctgcccggtgctggaaggttaaggggaacacttagcgaagtttcgcgaaggtgtgaacttaagccccagtaaacggcggccgtaactataacggtcctaaggtagcgaaattccttgtcaggtaagttctgacccgcacgaatggcgtaatgacttgtgcactgtctcaactgcaaatccggcgaagttgtagtgcgagtgaagatgctcgctacccgcgattggacggaaagaccccgtagagctttactgtagcttagcattgaatttcggtattgtctgtacaggataggtgggagactgggaaactagggcgtcagccttggtggagtcgttgttgggataccaccctgatagtattgaagttctaactggatgccatgaaactggtgacaggacattgttaggtgggcagtttgactggggcggtcgcctcctaaaatgtaacggaggcgcccaaaggttccctcagaacggtcggaaatcgttcgaagagtgtaaaggcagaagggagcctgactgcgacacctacaagtggagcagggacgaaagtcgggcttagtgatccggtggtacctcgtgggagggccatcgctcaacggataaaagctacctcggggataacaggctgatctcccccaagagttcacatcgacggggaggtttggcacctcgatgtcggctcgtcgcatcctggggctgaagtaggtcccaagggttgggctgttcgcccattaaagcggcacgcgagctgggttcagaacgtcgtgagacagttcggtccctatccgtcgcgggcgtaggaaatttgagaggagctgtccttagtacgagaggaccgggatggactgacctatggtgtaccagttgtttcgccagaagcatagctgggtagctaagtcgggaagggataaacgctgaaagcatctaagtgtgaagcccacctcaagatgagatttcccatagcataagctagtaagaccccttgaagactacaaggttgataggtcagaggtgtaagtatggtaacatatttagctgactgatactaataggtcgagggcttgaccaatatagtcaagttgtaaatacattaaagaaactgtgtgcaattttgaaagagcaaaatctttcaaatagcgttccgcgatagctcaatggtggagcactcggctgttaaccgataggttggaggttcgagtcctcttcgcggagccaatatctcgtgataatggcatagaggtaacactccttcccatttcgaacaggaaagttaaggtctatagcgccgatggtactgcatgggagactgtgtggcagagtaggacgttgcgaggtaagtattaaagatagtcataatggctgtctttttttttatcaaattttgggatggtgaacatatagatatataaaaataggaatctcaccaataatgtggaatattaatggctattctgttaaaatatagatgaatatgctagaatttgtgttagtgaataatatatttcattatcatatgttatctaaaaaatttaattgatcaaagtttattttaaaattatcaagatatataaaaccaataaacttataaagaatgaattatattatttataacttatatggttgaaatttcatttgagaatctatatagtaattaggtaggaattatcgtagctttaatatgaatttattatgctgactttatagcgttgttaagatgaactatgataaaaataactaataattaatttacaaaggagacagatatgcctaatatttttgacggacttagaaaaatttcagataatgacatcattgaacaaattgcattacttgaaacaatgaatgtgacaaatatatcaaagccaattatacaaaaggctaagaaaagaactataagtataattaattttataggaagtaaaataggaaaaaatcgtgtgcttgaagaaccggaagtaaaagaaatatgggctttggttgacgaaaaaaaagaagaattggaaaagtgtacaagaaatgagttaaatgaaaggttgttcaacattctttccgaaaaggctaatgatgatttagagagtgcaacagaggacgaagtatcaatagaggtaatagaggaagcagctaaactatataaagtgcataaaaacttaacgccaaaccataaggctgatattatttattcaaaatataatgaaaagcttagtggtaaggctaaagaatatataaatggacaagcatttgtagatctacaagaaactacaaaagatatagaagaaattataagtagtatggatgaagaacaaaaaagagaatttactcaatcagtagatgttgcaaaattgacatttcttaatgtgtggaaaaaattagataggcaacattttataagacttatatggttatgcgttaaggcttatggaggtagatttactgtgaaagaagaagaacttccgagttttgtaacaagtgaagaggaagtggaagcatttaaaagagaagaagaattaaagaagtcgcaggaagaattgttaaagttgaaaaaacaaatagaattatgtaaggataaaataaattctattgagaatagtttagagaaagaaaaacgtctattgaagaacgcaattagaagtagagataaagcggaagaagatataatagatttggggaaaatacatattaaattaacatcagtcaagaaatcatatgaagatgaattaaaagagattaaggttaaaatggaaaacgcaccattagaggaactagactcacttatggaagaatttaaagtagttaagtttgaagaaattgatgtgaataataagatttcagatattaatataaaggccacatataagaaggaattgatagatgataatgttaaagcaatatctattaaagaggaaagtataaaaaacattggaatggaatttcaacatttaaaagaggaagcacataacttggtagatgcttataacaaaatgaaaagtgatgtgagaaataaagaagaagaaaagaagagtgaaatatttaagaaatggagccatttttttaataagtttacttttaattttgataacttgggtaatgtagtaagttttacccgaagcgaattacttaaaatcgaacaatgtttacatgaattacattttacaaatgatccaatggctttaagcatgggagtaatagaaagtaaaggcaataagaaaaaaaaggaagaatatgaatacatagatgtaagcttcttagatggctttaaaatagagattcagtttaggatattggaaaatggagaaaagacagtacatatagatgaaatcactccggaattttaaattatctcataagttatttttttacaagtatttggataaaattataattatggaatatttgcttagaatataaggtaaggagataataaaatgaatagttctgaattaacatcagaagatgttaatgaaattcttaaagatcagaaagagttttttagcactcaggctactaagaaaatagaatttcgaattaatcaattaaaaaaacttaaagaaagtataaaagattatgaaagtaaaattactgaagctttaagtcttgatttgggaaaacatgaatttgaatcatatgtaacagaaataggatttgtatatttgagtatagaaaatacaattaataatttaaggaaatgggcaaagcctaaaaaaacagaaacaccgatatttttaaagcctggaaaaagttatatagttagcgaaccttatggaagcgtgttaataatcggtccttacaattacccgtttcaactcgttattgagccgttaataggtgcaataagtgcagggaattgcatagtaataaagccttctgaaatttcattgaatgtttcaaatataataagtgaaatgatttcaaaaatatttgataaaaaatatataagctgtgtagaaggaagtattaagacaaatatttcattaataaatgctccatttgattatatattctttactggaagcgtaagtgttggaaagatagtaatgaaagcggcagcgcaaaatttgattccagttactctagagctaggcggtaaaagtccagtaatagtagatgaaactgctaatatcaaaatttctgctcaaaggattatttggggaaagactttaaatgcagggcagacatgtgtagctccagattatcttatggttagtaaaaatattaaagatgagcttattaaagaaatgaaaaatgccataaaagaattttttggagataacgttaaatctagtaaatattatggcaggataataaatgataaacattttaacagaataaaaaatttaattgataaagataaaaggggaattctttatggaggaagttatgatgaatatgaaaggtttatagagccaacaattatagatgtatcagcatttgaatcggaaagcatgaaggaagaaatatttgggcctgtactccctattattgagtttgttaattttgatgaggttgtaatgaaaatcaaaaaaatgcctaaacctctagctctttatatattcactaataataagaaaatacgagaaagagtcatcgaagaaataccttcaggaggcatttgtataaatgatactttaaatcatttagcaaatagtaatttgccatttggaggtgttggaaattctggtataggatcttatcatggagaagagagctttaaaacattttctcatagaaaaagtgtcctgaatagaggaacaaaaataaatattagaatactttttccaccatatagcgcaaagagtatgactttaattaaaaaatttcttaattaaaataataaatttctattaggaaactaagttttaatgttattaaaaagcaaaatgctgatatatcgtaggttataataataataattttattatatataggctacgatatattaaaggttagtataatttccatagaagaataaatttattactggtctaatgaaatgataagtagcttgaatttttacttataaatgatgtagtgaaaaattagagccataacttcgaatataaatcctattgagcatactccaatccaaccgaaatattgccagcttaaaggtgctagaaatgagcctaatgatccaccaagaaaatatgaaaccataaatacagtattaattcggctacgtgcttcatcaccaagctcatgtatccttgcttgattggaaacttgaccagcttgggttcctaaatctagtagtataacaccaataattaaaccataaagtttatatcctaaaatgaaaaaacatatataagataaagtagaaaaaataatgcttattcccactgtaaatttaggggtttttttatcagcaattcttccaacaaaaggtgcggcagcagctccagcaacccctattaaaccaagcaatccagcttcacgtgttccaagattataaacgtgagaacctaataaaaaaataacagaagtccaaaatgcactgaaagctccaaacatcaatgctccatttatagatgcttctcttaaagttttctcttgtttaattagaggaaatatggagagtattagcttagcgtatgatatactggagtttggtatgcttgttggaaaaaagttttttattattattgcaaaaagtgccattaagaatgcagcacagaaatatactgatctccaaccaaaagcttggccgacaatcccactaaatgttcttgatagtaatatgcctattagaagtccactcataacattacctattatttttccacgttctgaaggttctgccaaatgcgcagcaaatggaactattagttgaggaattattgttgtaaatccaactaacagagaagcaattaataaaattacgtaattaggagaaatagcaactaatagcaaagaaataccaacaactataagcatttttataattagattacgacgttcttttatatctccaagtggaacaaatagaaataatcctagagcataacctatttgggttagagttacaataaatcctgcttgagattctgaaatattaaagtttgtagaaatttgtgttagtaatggctgaataaaatataggtttgcaactgtagccccgcaagtaatagccataattaatattataaatctgtttaatttaaaatttgatttatgagtcattttaatcctccacaatactgtattgatttatgtatagatgctatacatataatataaaataaaataccttgaaaaggtatcttatattttgtctttaaattgctttagaaaattatacaaaaattctttattttctctgctagcacttctcaataactcttttataacaagattgtattggttgtgatagcttttatgatttttatgtgccacctcacctttttctgtaagcttcaatattagttttgaattactatcagaactcgcctccttaaatagatagcccttattttctaatctctttatagtttgtgagacagcacctcgcgtaatctcaagttttcttgcaatagctgaaatatgtaagccctcattttcttttatatattgcagcatgtgtatttcggaatgatatagatttgaatctgttccaaaatttttagctttcaaatctttttcaaagaaactacatattacttccagaaatatttcactaatttctttattgtctaataatttatccataataaatattgtatagatgctacacaatattgtcaaacgttataatgtaatagataatgctttagtgcagattataatgaatataaaaatatactagttaacgtatattaattatagttaaaaagtataatgataataattttataaatttgctttagtatatatacaatttaaaataaattcaaatataataggagaaattaattatgaattatactatttatgatttgatagagagacttattgatattgagaagaatgcagtagaggtatataaaaaaattgaagaaaatgcaaaagaaaagaattctaaaaatattgagattattacaagagtgattagaaaggaagaaattaaacatatcaaatattatgagcgattaaaagagaaatttaactatgaactcaatgatactattgatttttacttatatgacaaagttgtaaagcttttatatgaatttaagagtcaaattagaattccttatgtagacaatgttcaggatttaataaaatattcattagaatttgagaaaaatagcataagcttacttttagatatccagggaagattacttggaaacttaaatgatgtaaacaataatgtatataagattatatcaaatattatagaagaggaaaggcgacatgagaaaatgtttagtgatttggttttgaaataatatttaagatataacttctaagaaacattaatatatgcagtgaagtagagtaagtctattagtaaactatttctagtgtgtcagtatagataaaatttagaataataacgtataatagagaaaagtatgaataatcttataaaattagggaataatttaaaatgtaagtaatttagaaatgttaagataaaacacgtcgctaagacatataaacaaaaacaacttaagtttacaagatacttgaaatgtaaaattataagttttatgaaaaatgttgacaatattaaatagcgatggtatgatttaattcgttgctaaagattataaaattcgataacctaaagctaataaagcatataagaaaaaatgtttaaaaagttttaaaaagggttgttgacaaagtctgaaagtgatgatatactgattaagctgtcagaaacgacagaaacttgtaagtcttataataacaggatttagaaggaaaaattggtctttgaaaattgaacagaataacataaatacatttaagtaaaccggcaatttttatttgagtaagctaagattaaactttttattgagagtttgatcctggctcaggacgaacgctggcggcgtgcttaacacatgcaagtcgagcgatgaagctccttcgggagtggattagcggcggacgggtgagtaacacgtgggtaacctgcctcatagaggggaatagccttccgaaaggaagattaataccgcataagattgtagtgccgcatggcatagcaattaaaggagtaatccgttatgagatggacccgcgtcgcattagctagttggtgaggtaacggctcaccaaggcgacgatgcgtagccgacctgagagggtgatcggccacattgggactgagacacggcccagactcctacgggaggcagcagtggggaatattgcacaatgggggaaaccctgatgcagcaacgccgcgtgagtgatgacggtcttcggattgtaaagctctgtcttcagggacgataatgacggtacctgaggaggaagccacggctaactacgtgccagcagccgcggtaatacgtaggtggcaagcgttgtccggatttactgggcgtaaagggagcgtaggtggatatttaagtgggatgtgaaatactcgggcttaacctgggtgctgcattccaaactggatatctagagtgcaggagaggaaagtagaattcctagtgtagcggtgaaatgcgtagagattaggaagaataccagtggcgaaggcgactttctggactgtaactgacactgaggctcgaaagcgtggggagcaaacaggattagataccctggtagtccacgccgtaaacgatgaatactaggtgtaggggttgtcatgacctctgtgccgccgctaacgcattaagtattccgcctggggagtacggtcgcaagattaaaactcaaaggaattgacgggggcccgcacaagcagcggagcatgtggtttaattcgaagcaacgcgaagaaccttacctagacttgacatctcctgaattacccttaatcggggaagcccttcggggcaggaagacaggtggtgcatggttgtcgtcagctcgtgtcgtgagatgttgggttaagtcccgcaacgagcgcaacccttattgttagttgctaccatttagttgagcactctagcgagactgcccgggttaaccgggaggaaggtggggatgacgtcaaatcatcatgccccttatgtctagggctacacacgtgctacaatggctggtacagagagatgctaaaccgcgaggtggagccaaactttaaaaccagtctcagttcggattgtaggctgaaactcgcctacatgaagctggagttgctagtaatcgcgaatcagaatgtcgcggtgaatacgttcccgggccttgtacacaccgcccgtcacaccatgagagttggcaatacccaaagttcgtgagctaacgcgtaagcgaggcagcgacctaaggtagggtcagcgattggggtgaagtcgtaacaaggtagccgtaggagaacctgcggctggatcacctcctttctatggagaaatctagatcagcatgatgtctggctagtacagatacattattatgtatcaaaatataaaatacttgctcaaaggttacttaagtatttgttctgttcaattttgaaagactaagtctttcaatgttctttgaaaattgcacatagatttaatgtatataaaatacaacaaagccaagaataaatattctttgtgatatgactaataattaggtcaagctacaaagggcgcatggtgaatgccttggcatcaggagccgatgaaggacgcgataagctgcgataagcttcgggtagacgcacatagtcagagatccgaagatttccgaatgaggaaactcacatgggaaaccccatgtatcataaagtgaatacatagctttatgaaggtatacccagggaactgaaacatctaagtacctggaggaagagaaagaaaaatcgattttcttagtagcggcgagcgaaaaggaaagagcccaaaccagagatttatctctggggttgcggacagaacataacgagaaatcatagttaattgaacacaactggaaagttggaccacagtgggtaatagtcccgtaagtgaaaattatgataatcagttctgcaccagagtaccacgagacacgtgaaaccttgtgggaagcagggaggaccacctcccaaggctaaatactacctgatgaccgatagtgaagcagtaccgtgagggaaaggtgaaaagaaccccgggaggggagtgaaatagaacctgaaaccatgtgcctacaaccgatcagagcaccttatgtgtgtgatgatgtgctttttgtagaacgagccaacgagttacggtatgtagcgaggttaagtacttaaggtacggagccgaagggaaaccgagtcttaatagggcgactagttgcatgctgtagacccgaaaccgggtgacctatccatggccaggttgaagcgagggtaaaacctcgtggaggaccgaaccacgttgctgttgaaaaagcatgggatgagctgtggatagcggagaaattccaatcgaactcggatatagctggttctcctcgaaatagctttagggctagcgtcggaaaatgtgagtagtggaggtagagcactgaataggctagggggcatagcgcttaccgaaccttatcaaactccgaatgccacatactatcagtccggcagtcagactatgaaagataagttccatggtcaaaagggaaacagcccagatcgtcagctaaggtcccaaagtgtaagttaagtggaaaaggatgtgggatttctaagacaactaggatgttggcttagaagcagccactcattaaaagagtgcgtaatagctcactagtcaagagatcctgcgccgaaaatgtccggggctcaaacttaccaccgaagctacgggttcacgcattagcgtgagcggtagaggagcgtcgtaatcgggctgaagtcgtaccgtaaggagcggtggactgattacgagtgagaatgttggcattagtagcgagatgtaggcgagaatcctacaggccgaatatctaaggtttcctgagtaaagtttgtcttctcagggttagtcgggacctaaggcgaggccgaaaggcgtagtcgatggacaattggttgatattccaataccactataatcgttattatcgatggtgtgacggagaaggataggatgtgctagctattggatgctagtctaagcgtttagggagttgggattggcaaatccgttccaacaattctgaggcgtgatggggaaggttctacggaaccgaagtatctgattccatgcttccaagaaaagcatctagaaagagaagtagtgcccgtaccgcaaaccgacacaggtagatgaggagagaatcctaaggccgacggaagaattgcagttaaggaactaggcaaattgaccccgtaacttcgggagaaggggtgcctgagaaatcaggccgcagagaataggcacaagcaactgtttaacaaaaacacaggtctctgctaaagcgaaagctgatgtataggggctgacgcctgcccggtgctggaaggttaaggggaacacttagcgaagtttcgcgaaggtgtgaacttaagccccagtaaacggcggccgtaactataacggtcctaaggtagcgaaattccttgtcaggtaagttctgacccgcacgaatggcgtaatgacttgtgcactgtctcaactgcaaatccggcgaagttgtagtgcgagtgaagatgctcgctacccgcgattggacggaaagaccccgtagagctttactgtagcttagcattgaatttcggtattgtctgtacaggataggtgggagactgggaaactagggcgtcagccttggtggagtcgttgttgggataccaccctgatagtattgaagttctaactggatgccatgaaactggtgacaggacattgttaggtgggcagtttgactggggcggtcgcctcctaaaatgtaacggaggcgcccaaaggttccctcagaacggtcggaaatcgttcgaagagtgtaaaggcagaagggagcctgactgcgacacctacaagtggagcagggacgaaagtcgggcttagtgatccggtggtacctcgtgggagggccatcgctcaacggataaaagctacctcggggataacaggctgatctcccccaagagttcacatcgacggggaggtttggcacctcgatgtcggctcgtcgcatcctggggctgaagtaggtcccaagggttgggctgttcgcccattaaagcggcacgcgagctgggttcagaacgtcgtgagacagttcggtccctatccgtcgcgggcgtaggaaatttgagaggagctgtccttagtacgagaggaccgggatggactgacctatggtgtaccagttgtttcgccagaagcatagctgggtagctaagtcgggaagggataaacgctgaaagcatctaagtgtgaagcccacctcaagatgagatttcccatagcataagctagtaagaccccttgaagactacaaggttgataggtcagaggtgtaagtatggtaacatatttagctgactgatactaataggtcgagggcttgaccaatatagtcaagttgtaaatacattaaagaaactgtgtgtaattttgaaagagcaaaatctttcaaatagcgttccgcgatagctcaatggtggagcactcggctgttaaccgataggttggaggttcgagtcctcttcgcggagccaatatctcgtgatgatggcatagaggtaacactccttcccatttcgaacaggaaagttaaggtctatagcgccgatggtactgcatgggagactgtgtggcagagtaggacgttgcgaggtaagtattaaagatagtcattatgactgtcttttttttatacagaaattatgaaataaatagtatatttatcataagaaggagtgctttaattgtatataagtgaaacaaagattgtagtaagatatgcagaaacagataaaatgggaattgttcatcattctaattactttatttggtttgaggcagggagaactgatttcataaaaggaagtaatataagttacagtgaaatggaggaaaatggcatactaatacctttagctgaaagtaattgtaaatatattataggagcaaaatatgaagatgaattaatcataaaaacatgggttaagcaactaacacctgttaaggtagagtttaattattcagttatcagagaaaatgatcaaaaagaaattgctaaaggaagtacattacatgtttttgttaacaatgactttaagataattaacttaaagaaggtaaataaagaaatattcaataagttagaatctttaatataaaatatatcgtgtgaatctagaagatcatatcttaaattaagaattttagatatgatctttgttttgtagcaggtctattcattaaccaatacttttacgatttctccaatataaattgtatgataatctttttcaggataaattttctcatcaaaagaaggattatcaaagttctcaggtttaatttctgtatgatacatctttttgcatactaccaccatttttgcttctttaaagtaagtattattctcatcaaaaattggagttaaatttgctttttcaactttgttattatctcttccagaaagacttccacaaatatttaaagcttttctataatcttcgctaaaaaatgataatgtaaatgtatcatttgaatctacaaattgttttgtgtaacgtccaggtctaatgtatacagtagctgagtttttaccccagaatacgcctagtcctccccaacttgcggtcatggtattgaatttattttcagtaccagctgtgattaataaccattcgtgtccgatgagagtgaatggatttatatttaggtttttaatttcaatttctttgaatgacatatgcttgcctcctataaatttttttatttaataatttatacttattttaaagctattagaataaaagttcaattacataatttttaattttatataattacttaaatcacttttttaggaaatcgataagtgttttagcggctattgacagattatttgaatttttatagatcacacctatgtatctgggagggatctcatcttttagaggaatttctaaaaggattttattttcaagctcatcatttaaaaactcttttataacagaagtaataccaagtcccatttttgcgcattcaattaaaaaatccatattgctggcttcaatatctggaatgatattgatattatgtttattaaaatagctttctatatgttctcgtgtagcgttaggattttcaagaagcataaaagatccttcagctaatgtatcatcagcagaattcaagtttagtttttctaaataagtaccacttgctactaagatatcttgaattttgcaaagccttataaaattaagatcatcttgggtggaagtagtaccgattatgcctaaatctaatttctcttcttgaactaactttattgtgtccaaagtaggtttatttattatcttggtcttaaagtaaggatattcttttataaattcccgaaatctaggtaaaaaataatttttcccaatggttgtgcttacacccaagttaattgtaccagtttctttattttttagcttttccaaaatattctctccaaggttaagttcatcaaaagcattttctatgtgattaaataatatttttccttctggtgttagggtcacaccttttgaacttctcgaaaataaggttacattaaaagaattttctagtgtttttattgatttacttacagcaggttgagaaacaaaaagaatttcagctgcacgggatatattcttacatttggacactgtgagaaagactttataaagatttagatcaaaaatcatagtataactcctaattatagtattcataactaatatatatttttattatacattaagacaagctaaaatagtaataagctagaaaaatatttgaatttatattaaaaatataaaagaaaggaagaatatattatgaagattggaataattggaatgggagcgataggtgggtatattgctgctatgctttgtagaagtaaagaaaatgttaatgttgtagcttatggaaaaacattaaataaaataaagactgatggaatttcattgaaaagtgaaataaatggaagttttactgtttttcctacacttgcaacagatgattcagatgaaattggtgttgttgacattatctttgtttgcgtaaaaggatattctttaaaggcggcagcaaaagcaattttacctatggtaggtgatcatacattaattattcctataattaatggggtagacggcggaaataagttatattcttacttaagaaagggaaaagtaacagatgctattatgtcaattagctcaaaaattgaaggtgatggagttattaagcatactagccaaaatactagaatatttatatcatctaataaaaaacgccctatgtataaaagagatttagaacggatctataatgttttaactaaatcaaatattttatgtgaggtaagaagagatgcagaaatttttgcatggaataactacgtatttaattgtgcttttaatgtaactgattcatattacgatgtgaaagtaaaaggaatattagaagataaaatgaaatttgaaacattttgtaatgtagcaaaggaatgtgaagaagttgctagaagtaagggaataaatcttcatcctaatatttatgagaatgcaataagtacactaaaaagcttatctaaaaaaagtataagttcaatgcatagagatgtagtatctggaaaaaaatttgagcttgaattattttgtggcgatttatgtaggatgggaaaagatttgggagttcctaccccttatactcaaaaagcttatgaaaagctaagagttttacaacctgtgtaagatattctgaaacacatataataggtatgtaaagcattttcttaaataattcatttatagttcacgaatatgattatttagtttaaaataagattgatcattaaaaattcactagtgtgttataatattagcaactataatagtttattattttgacttatttacggaggtgaatttttagtgtgatttaactcttgcactaagatatattatggattataaaaataaagtatgcataattactggaggagctttagggataggaagatgtttaacaagagaattttcaaatgtcggtgctaaagttatcttcattgataaaaataaagaagcagggaatgaaaatgtagaatatataaaaagaaaagatggagaagttgaattctttttaggcgatattgcagaagaggatactttatataagtttgcagagtttataataaaaaaatataaaaatatagattacctcattaataatgcttgtattaataaaaaaggaattatttctaaatgttcatatgaagattttaattatgtacttaaagttggagtaaccgcgccatacatattaacccagttacttatgaataattttaataaaaatggtgcaattgtaaatatttcatctactagagcctatatgtcacaatctgatacagaaagttatacagctgctaaaggcggaattttggcattgactcatgggctttctgttagtctttctaataaagtcagggtgaattcgattagcccaggttggattgatacaggtgcttattatgatgaagaatatgtaccaaagtatagtgagagtgatttattgcagcatccatcaggcagaatagggaatccaaaagatatagcgagagcagctatgtttttgtgtaatgaagaaaatagctttattaatggagaaaatattaatatagatggcggaatgacaaaacttatgatatataacgatgataatggatggagatatgataataattagtatttaatacgttataaaaatattttaaatcttatgtatatagaagttattttctatatgcataagattttttttttcggatttacatatttataattaggtgctggaataaacttcaaatataaaacatagtataaagtagagtaactaaaggaggaataagagatgaattttttacttactaaactaaatgatacttttagggataagaaagcctattttttcattgtactgataatgttttgtttaggaatatcttttgggctttacactgttaaatatatgggggaatcagataaaacggatttaacaaattatttttttagttttactaattctataggtagccatcctatcaattatggaaatttattattcgaggttataaagaaaaatatactaattattatacctatatttatattaggtttaactttttttggagctcctgtaatattaattttggacttattaaaaggttttacattagggtatactttttctttcatgataactacttttcaaggaaaagggattggactagccttaatatctattgttcctcagaatttaatatatattccatgtttcatagcattaagtgttattagtttatctatgtctacagaaaggtttaagggaagatttttcaaacatggaaagataaaagatccttttttagatggtgtattaaataaattaattgtcatcctaatattatttacaataggcatattaattgaaacttatatatcaccatctttgataagatttgtggctaataaattctatttataaaacaaaagatgattttaaataaggaaagaaaaatgacgatttggtcgaatgctaatcataatcaatggtataggagttaataatgataaatagtataaataattataaaaattatttgtttgagagtggtaaaagtgagaatactatatatgcatatgtaacagatgttagtctctatttaaaattcttaaatagaaaaaagatagacttatatgaaagtgataaatcaacggttatgtcatatatacaaaatctcactaatcaaggaaaatcagaaagatctataaatagaatagttataagtctaaggaatttctattcatatttgaaaagtgaaactttaattaaggaagttcctaaaattgaatataagagttcaaaaaataatagaaaattgccacaaattttgaccattgaagaagtagataagataattagaatagtggaaaaagactgctcaaaaggaattcgtgataatgcattgttagagttaatgtacgctactggaatgaaagtttcagaacttattggattaaatgtagatgatgttaatcttgatttaaattttgtaaaatgtacagataacaagcattatgaaaggcttattcctataggaagaagcgcttgtaaagcattaacagaatatttaagcataagatataagattgcacaatgcggtgtgtctaatctttttgtaaatctaaatggtaataagctcacaagacagggtatctggagaattgttaaagaatactctagaaaagctggtatagataaagacgttaatttaaacactttcagacattcatttgctgttcatcttcttcaaaatggagcaaatgttagggctgttcagaagttactcggtaatcaggtattaacatatatggatacgtactatgagataatcaataatgataaaataaactatatatacatgcatactcatccaagagcttgagaatagttatttgtacaagaaattaattaaaaatattacgggagtttccacccgtttgccaccacttatcaaattggtggcaagttttatttaaggatgaatttttgtatttgtagattaatatttatttattaaaatttacagaaggaatattccaacttttgtataattaacttatatgagaggaggcgatatttatggtcaaaaaggaaaggtgcatatggatagcgtagcctttatatacaattagttatataagaggaggaagattaatgttattaagttcaatacagaaatgctctaagtgtgatataagttttgcatgggaatacacgactccagaaacagaaagagtattgaattttgaaggagagacttcatcaatagctagtgctaaactagtaagtgctaaagaagggaaatatgatattaaagtgaaatgtcccaaatgtaaagctttaaataagttttatattattgtgccaaggtgtaataatgagaaatgatatagagagtaaacttaactaagaactctagaaatagggttctttttgacgttataaaattttattttaaatttaaattgatatagaaaaagtatagaagtaacctaataataatatttatagatgattgtggttataggtaattaatggtataatcttaaatgcaattttaattaataatagattggggaggaattttttatgcatccaacaagcactacaatattaagtgtcatactaattatagtatatttaatattatcaatagtaatatttgctttatcaatatatgcattcatattatttataaagctagctaatagaggtataagagcacttgacatttatataggagaaaaagaaggacatgcaaagggagattattatataaatagcaataaatatgaaaattattaataataatttgttttttatataaagtatggaggtataagatattaatattttatataagaccacatagcaaattgtaatttagatgttttctatgaaatttaatatattataagtcataatatattatgaaacatgaacaagcacatgtatagcaatagttgttcttagatacagttagaaaaattatcaattttattgagagcatatataagcaggtgagataatgaatgataaagaaattgatgatatgttttttaaaatttatgattacgagtggcttgacaatcaatataaagaagtagctagaaagtcgtcagcgtatattggctttagattgtatataaagcttaaaacacttatcacttcggttttaaatataaaaatatgatatttattataaataagataaactgtaataatgctttagcattattatttaaaactataaaaacaaagagcaacatacataggggtaatatgaatgttgctctttgttttttatattatagggtaaatatttatgaaaaaaagattttattaactttatgtacttattttagtatatcattgtgtcagtatgatggcagactaaaaaaataaaagaaaaattataaatttcttaatagcggttttggatttgaataaattatttatggttattttaaagtaatatggaattagaatactaattgataatagtattgtacatgctgagttagtatatactattagtaacatatattagagcttgtaaatagctaaattagcataaataatgtcgtatattgtagtgaagtgatttttatggaaaagtatacaataaaacgacagaaaatatatagattattacaaaaaattacataatttatatttaagtcgaacttctgtgcaataagtaaaacaaatatgatatacttataaaaatgtaaattaatctagctataggaggaaataaatatatgagaaaaaattataggtataataaaagtaaagataataacataaaaaaagctagaataattattttatttatgactatagtttttttaatagtcggaggtagctctctcattgcagcgaagttttccaaaaatagacaagaagtacaagcacttgatgacactaagcaaagtggagattcagattcaaattcaaatgataaaaaggataaccgagattctctgaatgttgagagtaattcagaagtagaagattcttcatttattgaaaagtatttgaatcagcaaatgaaggggcaaaagccagatggagcagacggtaagaaagtagtatatttaacatttgatgatggtccatcggaaacagttacacctcaaatactagatattttgaagtcggagaatgtgcatgcaacattctttattgtgggaaaatcactagataaagatgagaacactaaaaatatagttaaacgagaattatctgaaggaaattctataggtaatcatacttattcacataattataattatttatatccaaatggaaagataaacttatcgaattgtatgtctgacattgaaaaaacaaatgagtctctaaaaaaggttttaggagaagatttttcaactagagctattagatttccaggtgggcatatgacttggaagaataaagattcagttggtatggatactatggacaaggctttacatgaaaaagattatcatcaaatagattggaattcattatctcaggatgcggaaggtgcacctaagaatgcagagcaattaaagcaggaagttataaaaactacagcaggaagggaaaaggcaataattttgatgcatgatacttacggtaaagaagaaacagcaaaagcattaccaggaattatagaatatttaaaacaacagggatatgaattcaaggttattaaatagtatttattaagaaaaagatgaatttagaaattatattaaaattcacctctttctatttatataagaagattattgtagtcttgatttgcagttttatacaaaggtgatggaaaagttaacttaagcttatccatcaccttttgtatattcacataaatttaaaatgggactttttaattatatatatagtagtaaatgacttaagtctaaaaataaaatagattgtcatttggaaagttgagatatacactagtgtttagagagaaattcatattctttttttctaccttaaattcaatcaattttgcatcttttttagtattgtttttcatatatatagtaaattcaaaggggttttctataatagtatcaatggtataaggaaaagtattaatgttttcattattgtttgtacatatttcaatatcatgagctcttatgcagatatattggatattgtctggaatttcgtcattaataacatattcgtggccccaattttcagcataaatggtatttttcccagtctttttagctttagatatgtttttacatcctgttaatgtagcttctgtaagacttttaggatgtttaaataagtctttcttttctcgattttctaaagaaactccattttcataaacaattatattgtcgcaaactctataagcttcagctatatcatgagtaacaaagataacattaccactataatcttttactatagacattaattctttttctaaatcatttcttaaatgttgatctaaagcagagaaaggctcatccaaaagtaaaatatcaggggacgttataagtgccctagctaaagctactctttgctgctgcccgccagataactgccaaggatagcgtttttcgagtccaccaagatgtaatctttctatatattctttgattaaggattccttttgatctttttccatcttagaaatgcctatttcaatattatcaattatattcatattaggaaacaaagcataattttgaaatagataaccgatttttcttttctgtggagttaaattaattttattctctgaatcaaaaaaaatcttatcatttacaattatttttcctctagaaggagtaactaatccagatatacattttaaactcatactttttccggatcctgatgaacctaagaaacctagaacaccgcttttatgttcaaaattcacatttaaattaaatgaggaaagatgtttttctatatttacatataatgacattatctagcaccccttcccataagctttaactgaacttctgaccaatagtttaatattagaattagaaataatgataaagtaacaattatgataacccaaagaattgctttttgcatatctccaccttcggctgcaaagaatattgcaagtggcatagtttgagtttttccaggaatattacctgctagcataagtgttgcgccaaattcacccatagctcttgcaaaagataaaactagtccacctataatacctggcatggctaatggaatagcgattttataaaatattttaaattcactaaggccaagagttctggcagcagaaagaatattaatatctatttgctcaaaagcagaacgtgtggttctatacatcataggaaatgaaaccactatagcagcaataaccgtagcactccagctgaaaattaaagaagtattaaagagatctagtagctttcctataggaccatttttaccacagataagcaataaaaagaagcctacaacagttggaggaagaattaaaggtaaagtaaataacccatctattattcctttagattttcctttgaaatttgacatccaataagaaactataattcctaaaaagaatgttattactgttgataatgtagcagtttttatagaaatccataaaggtgaaaaatccatattaattcctccttaaaagttagacaaactaaaaaattgtcaaaaaatataacataattctgtagcagtcaatctaaaaaattttaattatagtagattacaactgttaaaaatcaatgcaaaatagaataaatatataataaaatatttaaatatgttttatatagtcatgtttgataatgtttagttcggttttattatgatttttataatattagcattaattctataaaaatacaatagtgtattacatatgattaattttgttttcttatagtaaaaaaataatagaaatattattaaaaaagataacttgaaaatatttacaatttaattgaaaagatgtatgatattaccataaaaataaatttggtataaaaaattttttttaggtaaggaaatgatttgtagaatatataggagattaatttaataataatatttcagaagtggattttataggctactgaatatcattacaaacaaagtagacaagcatttatttccgttataaatatgattccaaataaaatattaattaagataggggaagagaatatgaattttgatcaaattaaatcaaagtctgaaaactataaggaggatatgacccaatttcttcgtgatttagttgcaatacctggtgaaagtgcagaagaagaaggtgttataaaaagaatagaacaagaaatgaaaagcgttggatttgataaagtagaaatagatccaatgggtaatattttaggatatatgggtacaggggaaactttaataggctttgatgctcatattgacacagttggtgtaggaaacagagataactgggactttgatccatacgaaggatatgaaacagaaactgaaataggtggacgtggtacttctgatcaattaggcggaatcgtttcatctgtttatggtgcaaaaataatgaaagatttaggccttttaaatgaaaaatacacagcattagttgttggttcagttcaagaagaagattgtgatggactttgctgggaatatataatcaaagaaagcaaaatcagacctgaatttgtagtttctacagagccaacagatggtggtatctacagaggacaaagaggccgtatggaaatccgtgttgatgttcaaggaatttcatgccacggttcagctccagaaagaggagacaacgcaatttacaaaatggctgaaatattaatgaacattcgtgaccttaacgaaaatgatgtagctgataataaagaaatcaagggcttagtaaaaatgttagatgaaaaatacaacccagaatttaaagaggctaactttttaggaagaggtactgttacaacttctcaagtattctatacttccccaagccgttgcgcagttgctgactcatgttcaatttcattagaccgtcgtatgacagcaggtgaaacttgggaaagctgtttagaagaaattcgtcaacttccagctgttaaaaaatacaatgcaacagtaagtatgtataactacgatagaccaagttacactggtttagtatacccaattgaatgctacttcccaacttgggtaattccagaagatcatattgtaacaaaagcattagaagaggcatataaaggcctttacggcacaacaagagtcggtgctggtgaaaatgaagcaatgagaaaagctcgtccgcttactgacaaatggacattctctacaaacggtgtttcaattatgggacgtaatggaattcctgtaataggatttggacctggtgcagaagctcaagcacatgctcctaatgaaaagacatggaaaaaagatttagtaaaatgtgctgcagtttatgctgctgttccaactatatatacttcaaataaataaatattgttagcgaaaattaagggggatattaaaattatgagtattgtagataaatatgttaatgcattaaaaagcttagaaattgatcaaatgtataaaaatgacttttttcttacatgggaaaaaactacagatgagttaaaggcagtttatgaagttgcagatgcattaagagaattacgtagaaataacaaatcaacaagattatttgatagtggacttggaatttcattattccgtgataattcaacacgtactcgtttttcatatgctagtgcatgtaatcttttaggtcttgaagtacaagacttagatgaaggtaaaagtcaagttgctcatggtgaaactgtaagggaaacagctaacatgatttcatttatggctgatgtcatcggaattcgtgatgatatgtatattggaaaaggaaataaatatatgcatacagttgctgatgcagtaaaggaaggatatgaagatggagttcttgaacaaaaaccaacattagtaaatctacaatgtgatattgaccatccaactcaagttatggcagatatgctacatatcatacatgagtttggtggcattgaaaatttaaagggtaaaaaaatagctatgtcttgggcttattcaccatcttacggtaaaccattatctgtaccacaaggggttataggattaatgacacgtttcggtatggacgtttgcttagcacatccagaaggctatgaagtaatggaagaagttgaaaatatagctcgtaataatgctaaggaatcaggtggaacattcacaaaaactaataatatggcagaagcatttaaagatgcagatatagtatatccaaagagctgggctccttttgcagcaatgaaagaacgtactgatctttattcagaaggcgattcagaaggtattaaagaattagagaaaaaacttcttgctcaaaatgcagaacataaagattgggaatgtacagaggaattaatgaaaacaactaaagatggaaaggcactttatttacattgcttaccagctgatattagtaatttgtcatgtgaaaaaggtgaagttgaagattctgtatttgaccgttacagagttccactttataaagaagcaagctataagccatatattatagcagcaatgattcttctagcaaaggtaaagaatcctgcagaagttttagaaaaaatggctcaaagtgaggatataagattcaagggttaggaactaataaaaaaatatacacatttaaaaagagcagctatgctgcatataagaacattttatttaaaaagagcagctatgccgcatataagaatatttcatggcatataatttgaatttttattttctttctagtgcctaaatatttaaaaagagaattggagggatatatggtgagtaagattgtaatagcgttaggaggaaatgcactgggagatacactagatgaacaaatgaaatcagtaaaattaacggctgaaagtattgtagatttaatcgaaggtggaaaccaggtggttattactcatggaaatggaccgcaagtgggaatgataaactcagcaatggagtttgttaaaagatctcaaataccattaacaatgtgcgttgcaatgagtcaagggtatattggatatgatttgcaaaatgcgattagggaagaacttttatcacgtaatttaaataaccccgtcacaactctcattactcaaactcttgtggatcctaatgataacgcatttttaacccctacaaagccaattggaggtttttattcaaaagaggatgctgaaaaattagagaagactggaatagtgatgaaagaagattcaggtaggggatataggcaagttgtttgttctccaaaacctattgatataattgaaaaggaaacgattttagagctagtatcggctggagaaatagttatttcatgtggtggtggtggaattccagttattcaaacagaaaacaatcatttaaaaggtgtaccagcagtaattgataaagattttgtagcagcattgttagctaaagagatagatgcagatagtttgattattctaacagcagtagaaaaagttgctgtaaactttggtaaaccaaatattaaatggctggattcacttacagtggaagaagctaaaaagtatattaaagaaggccaatttgcaccaggatctatgcttccaaaagtacaagcagctttagaatttgtttcttcaggaaaaggaaggaatgcaattattacgcttctaagcaaagtacaggatggaattctaggtaaaacaggtactcactttaaaatgtaaagttaaacttatgcattatgctataggtatccaaaacaaaacttagacttatgcaataacttaccgaaaggacaggtactctgttgtttcggttactgagaataagttgaggctttctaacataataagttgcaccatttcagcatgatcccgagacaagctcgtgacaagcaaaaatggaacaacttatgatgaagaaatgcctgcaacatattctctaatgtaacactgcacaaaaaagtacctgtcctttctgatatagcagatttttcaagctataagtataattctcaaatttgatatctatagatatcaaaatcgtaacctagacttatgcaataactcactgaaatcataaatattttgctccacagctagctgttggacattgtactcgttgaggatataagtttaactagagatttaggaggagaggaatacaactacatataaggaataatcacaaaaatatcaggcacaatcaaataaataacaagtctatttgccagcctattttccgtcatcctacgttggcaaattgacctaataggcccgctatgagggcaattcgcctccttgcctgatgaaaaatatccatggcaactttggacttgttattcattttcatgtgcctaaaatgaaagaagtgcttatgaatgattattattaagaatggaactattgtgactgaatcagaaagttattgttcagatattatgatagagaataataaaatatcttgtattggggtaaatttatccaatgataatgcagaaattattgatgctttgggaatgtatataattcctggagcagtggatgttcatactcatatggatttgcaatctggaaatagtcgatcaatagacgacttttatactggaactgttgcagctgtttgtggcggaactacaagtattgttgatcatgtagcctttggtcctaaaaattgtgctcttcgccaccaaattgacgaatatcataaattggctaatggaaaagcagtaattgattatggattccatggagtagtacagcatgtaaatgatgaggttttatctgaaatggagtctttggctaaagaaggaatttctagctttaagatttatatgacatatgattttaaactggatgacgtctcaattttaaaagtattaaaaaaagcaaaagaattgggagtaattattgctgtacacgctgaaaacaatgatgttataaattaccttagagaaaattatgtttcaaatggctgtttagaaacaatatatcatgcaaaatcacgaccagaccattgtgaagccgaggcaattagcagagtgctacatcttgcagcattggcaggagatgctccaatttatattgttcatatatctactgaaaagggattggatgagataagaaaagcaagagcgcaggggcaaaagaatattttttctgaaacttgcactcagtacctaacaatgacagagaaaaaatatcttgagccagacaataatggactaaaatatgtaatgtctccacctttgcgtcaaagtaatgatattgctgctctatggaaaggtgtacaagatggtgtaattaatataattgctactgatcattgttcattcaatctaaagggtgacaaacaaaagggtattaacgattttacaaaatgccctaatggagctcctggcgttgctgaacgagtaagggtaattttctctgaaggcgttatgaaaaagaaaatttcaattaatcgttttgtagaacttttatgtacaaatcctgcaaagatttatggactttatcctaaaaagggttctttaattccaggtggggatgctgatattactataattaacccaaattctgagtatactcttacaagaagtatgcttcatggagctgtagattacacatgctttgaaggcatgacattaaagggagatattgatattgtaatacagaatggtaaagtagcttataaaaataataagtttttagggaaaaaaggtgatgggaaatttattaagagaaaagtaattgaataatattatattgtttatttaattaatatattaagcacaatggccacaatagttggttgtatgctttgaattataacaaaacatatttatattgtaatgtaaatataagatgataaaggagatttaaacatgaatgtatatgatgatttggatttttttaaaaggcttattaaagggattgcggaagagtttggtccaaactgtgaagtcgcgattcatgatttaaaagcaggatatgaacatagcattatagcgattgaaaatggtcatgttacaggacgtaaagttggggatgttgcatcgcgaattgcaatggaaacaattcactcaaatcttcagcataaagaccattatagttatagtacccgtacaaatgatggacgtattttgaaatctactactatatgtattccagatgaaaatggtaaagcgaaagcacttctttgtattaattatgatatcactcagctaatggtatctaataagattatagaagattttgtttcaataaaggaagtagaacgcagtgatgaaggtgatgttacaattccaaccgatgttaatcaactcctcaaagatttaattgaggaatcatatcaattaattggcaaacctgttgcggttatgactaaagaagataaaatgaaagccattaaatatttagagagtaaaggtgcgcttttaattaaaagatcgggagataaaatttcaaagttctatgatatttcaaaatattcactttacagctatttaaataacaatgaggattaaatatattactgtaaaatatttggagggattaataaaaaattgaacaattagtctttcattctgtagattattaatttaataagtaataattctgtgtaaatcagatatatataataatggaactcatatgtaaaataaataagcttagaaaaaatgtattactgacgtatataaattgattgaaaaataccaatatatggaatataattaaaattgatcaactagtcagttaataataataaaaacaagaaatgactagttcgtcaaattgacaatatggtaaacgtttccttgacgatttatatttaatgcataaaagtgaacctttgagcattagtaatgtatattttgggcacatgaaagaaaattacatttttgaatgtgccttattaggaggtcttgtgatgcaagatgagtatattgttaaaggcaatattatttttactaaagaattaggtaaatatgaaatatttgaaagtggatatattgttattgatggtaaatttgttaaaggtgtttataaagagctgcctgaaaaattcagtaaactaaagattttagattatggacctgcacttataataccaggatttattgacattcattcacatgcacctcagtttcctaatttaggattaggactagataaggaacttatgccatggttagattcatataccttcccagaagaaaaaaaatattcagatatagactatgcaaaaaaagtgtattctgcttttgtaagaagtttatggaaatatggcactactagatcttgcatttttgctaccattcataagaattcaacaaagttattaatggatttgtttgcagaagcaggattaggtgcatatgtaggaaaggttaatatgaatagaaatgcaccagaatatttattagaaagtacggaggaatccattcataatactaaagaactattagatgaatatgggaaaaaatatgaattagtgaaacctattattacaccaaggtttgttccaacatgcagctttgagctcttaaaaagtcttggggaattatcaaaaaaatataatgttccagtgcaatctcatttgagtgaaaatttgagcgaaatcagttttgtgaaaaaactacatcccaaattaagaaactatgcaagtgtctataatgaagctggattgcttggagatcttcctactataatggcccattgtatttggttagaagaagatgaaattgaactaatggtgagaaaagaagctttcattgcccactgccctaattcaaataacaatttatcaagtggtattgcgcctattcgaaaattgatgaaaaaaggtttaaatataggacttggaacagatatatcaggtggtcacagtatatcgatgactaatgtaattgctagttgtgcgcaggtgtcaaagttaaaatggctagaaagtaataaagcagacaagcctttaaccacagcagaattattatatttggcaacaaagggcggaggaaaattttttggtaaagtgggaagttttgaagaaggatatgaatttgatgccttaattattgaagatagcagtctatctatcttcaagccattgtcagtagaagaaagactagaaaaatttatttacaccggtgatgacagaaatattaaggaaagatatgttgcaggtaaaaagatagaagaaccgaaacaatattgaatatttttacgctaaaatttgattaactagtcaataagtactagcttgtatttattttaagcacatgaaaataggttagcaaatatattaattattttttgaaagtaccttagtcataatttaaacagaaaaaaatagaaaatagggggattatttatgagtgataaaatgcaacgcattccttttgaaaaaatgttaacttggattactagagagttaaaagaaaaagaatctatttttggcgtgcataaagataaattttattataatgaaactggaaaatcaattactttatttaatgagaaactttcatcaccaattggaccggcagcaggtccaaattcccaattaacacaaaatattgtttgtgcatatttaactggaagtcgttttattgaattaaaaacagtgcaagtcattgatggagaagatattacagtgtctaaaccttgcatcaatgcacaagatgagggttacaacgtagagtggtctacagaattaaaagtgtcagaagcctttgatgaatatgtaaaagcctggtttttacttcatgtcttaatgaaagagctcaaatttgcaaaggaaagagattttatgttcaatatgagcgtgggatatgacttgaaaggcataaaatcttctaaaattgatacttatattaaagggatgcaagacgcatcgtctacaaaaatttggacagaatgtcaagaaacacttctttctcatatagatatgttttctgaatttacaaaggaagatttggaaaaaatttcaccaactatttgttcatctattacgatctcaacacttcatggttgtcctgctaatgaaattgaaagcattgctagctattttcttgaagaaaagaaattaaatacttatattaagatgaatcctacattactaggagaaaagtttgttaaagaaactttaacagccatgggatatgactatatagttcttaatggacatcattttacaaatgatttgcagtattcagatggagttgcaatgctaaaacgtttgaaagcggtcgcaaataacttgaatttagaaataggagttaaactaactaatacactgccagctaaaattattaataatgaattaccaggggaagaaatgtatatgtcaggacgtgcattatttccactatctatatctttagcaagtaaattagctaaagaatttaatggtgatttgcaaatttcttattcaggtggggctgacttctttaatattgataaaatattatctacaggaattagtccaataacatttgcaacatctatcttaaagccaggtggttacgaaagaataactcaaatggctaaaaaagttgagaagcagcttaatggtaaaatttctggaattaatgtagaaattctggaggacatagtcaatcaaactattaatgataaacattatcgaaaagaactacgacttgttaatagcagaaaacttaattctaaccttcagctctatgattgtgcagttgcaccttgctctataggatgtccaattaatcagcaaatcccacaatatacagctttagtaggacaaaaaaaatatgatgaggctttttcaataattgccatagataacgcgttaccggctattacatcaactatttgtaatcataaatgccagactaaatgtactagaattgattatgatgaatctgtttcaatcagagatttaaaacaaattgcagttttaaatgcacaggataaatttattgagtctattgaaccaacagatattagaactgggaaaaaagttgttattattggagctggtcctgcaggtctttcattagctcttttcttaagaagaaatggtgtagatgttactgtaagggataaaaaggagagtgcattgggtgttgtagaacatgttatacctgagtttagaatttcttctgaaatgattaaaaaagatttggaaatggttaaaaagcaaggagtaaaatttcaattttgtatagatgaaaatattaatttgaaggatttaaaaaaggaatatgattatgtagtgttagccataggagcatggaaacctggaaaaatttcactaagcgattctgataataaagcaattaatgctatttcatttttagaaaaatataagaaacaagaaggaaatattgctttaggtaaaaaagtttgtgttattgggggaggagatgttgccatggatgcagcacgctcagctaaaagagtgagtggtgttgaagaggtttctattatatatagaagaacccaaaaatatatgccagcggataatgaagaaatagaacttgctatttctgaaggtattttacttaaagaactccttacgccaatttctattaatgatggaaaacttacttgtgaaaaaatgatcttaggtgatagagatgcatcattaagaagaagttctgtaggtactggagaaataacaacattagatgcagatacagttattatagcaacaggtgaaaaaattgatagtactttattaagacaaaatgaaataaatttggattctaatgaatttcctattgttaacgaaaaattagaaacaaatattgcaaatgtatatatcattggtgatttaaaaaaaggcccatctacaattgttaatgcaatagcggatgcaaaaatagttacaaaagatattctatcaaaagaaggattaagttctgattttaagcaaaaagattattgtactgatgaaaagatattatatggaaggaagggtatattaggagattcaaagtcttgtgaagaagaagctgatagatgtttagggtgcaagaacatttgtgaattatgcgttgatgtttgtcctaatagagcaaacgtaatgattaatgtaaacagtgattttgtttctaatcatcagattatacatttagatggtatgtgcaatgagtgcggtaattgtggtattttttgtcctcataaaggaaatccatataaggataaaataacagttttttggagtaaagaagattttgaaaatagtgataacaaaggattctttattgaaaatttagaaaaaggcatttgtctagtaagaaatgaagaaagcgatattataagttatactgcttcgcagcaatcagcagtttcaaaagaaatggctagtctaattcaaacgtgtatagataagtatgattatatcctttagtattaaaaattaaatagatagcaagcgaagaggttatgtaccattacaagaggaggagtgtatggcaaggatttagaaaattgaaacaacaataaggcacatgaatttgttatttatttgattgtgcctaacactagctataattttaaggaggacatttcatgaaaaaagatgtaaccaaacaaaaaccatcatttttggagagttattttcacttggaggaaaataactcaaatgtaaagacagaaatacttgctggaattactacttttgttacaatggcatacattatatttgttaatcctaatatattaaaaatagctggtatgaattctgcaaatgcagtaggagatgcagcagcacagtttagtgtaggctctgatccaatagtatcatcagttttcgtagctacttgtctcgcagctgccattggcacattaataatggggctgtatgcaaatcttccttttgctcaggctcctggtatgggtcttaatgcattttttacgtatactgtatgtttaaccttaggttttacatggcatcaggctttatcatgcgtattcatgtcaggtgtattatttatacttattacagtaacatccatacgagaaaagatagttgatgcaatacctcaaaatctaaaatatgcaatttccggaggtattggactctatatagctcttattggattgaaatctggtggtgtagtagtgtcaaacccagcaacactagttggattcggaaactttgcaaatccaggaacactgcttactataataggaatcataataactgctgttctaatggctaggggtattaagggttcaattttaattggaataatttcaactacaataataggaattccattcaaaatcacatcacttgaaaatttacatgttttcagtgcaccaccatcacttgctcctacgtttgcagcatttgattttgcaggacttttttcaaaaggcggcacatcaataggaggcgcatttcttagcgttataatggttgttataactatttgtttagttgatctttttgatactattggaactcttgtaggtacagctacaaaagctggaatggttgacgaaaatggtaaggttttaagaatgaaaaaagcattgatttgtgatgcagtagcaacaactgctggttcagttttaggtacaagtacaatttcaacatatattgaatctacagctggtgtttcagaaggaggaagaactggacttacttcaacagtagtgggaatattatttattttatcattatttttctcaggccttgttggtatagttccaggacaagcaacagctccagctcttgtaatagtaggtgttttgatgatgtcagcaattgtaaatatagatttcagcgattttacagaagcagttccagcattttttgctatatcgttaatggctttttcttatagtatagctaacggaattgcagctgctatgattttttatccaataacaaaaatagctacaggaagacaaaaggaaatccatccaatagtgtatatacttgcagtattattcattcttagatatattttacttccctttgaataaaaccatggaatagtaacttatataccagttaatgattattaggaagtatattatgagtaaaacattagtaatcataaaacttgcgagataagttaaaatgtccatgcccaataaggtaactaggtgtttagatttaataagtcacattcaaaaaataatcatggcaactttggaattgttatttgttttcatgtgcctaaaacaagctatatcacctagttcagccaatatgatattttctattaaagatagaacaagtatctgtaagtttgaaatattaactactgggagagtttacggatgtcagatatcggataaaaggaaaatcaattggataaatataaatttctacataataatataactggattatataatgggggaattaataaatggagaaaatcaaaaataatattaatactgctatggcaaagaaaaatgcagatcttgtattaaaaaatgcttcaataataaatgtatttactcaaaaaattgaaataaacgatattgcaataaacgctgatacgattataggtattggtaattatgatggcatttgtgaaattgattgtagtggattgtttgttgctccaggctttatagatgcacatgtgcatattgaatcctctatggttacaccagaaattttctctgatttagttattaaaagaggtgtcacaagtattattgcagatcctcatgaaattgcaaatgttttaggcgaagagggaatagaatttatgcttcaaaacagtacaaaaggagatatagacactttttttatgcttccttcgtgtgttccagcattggagtttgaggataatggtgcagttcttaaagctgatgatttaaatagatttatggataatcccaaaatactaggccttggagaagtaatggatgttaatgcagttatagcatgcaatgaaaatatgctgcaaaaaattatgatggtatgtaaacatcataaaaacattgatggacattgtcctaaagttagtattgcagagcttaatgcatatttatgctcaggaattagtacagatcatgaatgctcaaatgtagatgaggctttggagaaagtaaggcttggtatgtatgtgatgcttagggagggatcagctgcaagaaatctcatggatcttttgccagcagtgaatagtaaaaattatcatagatttttattttgcaccgatgatagacatattgaagatattatgaaagatggaagtatagataactgtatacgaattgcaattagggaaggtcttgacccaataaaagcatatacaatagcttctttcaatacagctaattgctataatttaagagacagaggggcgattgcaccaggatttaaggctgatcttgtgatatttgaagatataaagaaattagagataaaagatgtaattaaaaatgggaaaatatattctaacaaagaaacatattcaacagttataaataaaaaatctgtacagcttgattttataaaagacgatttatttcatattgaagcaattggtgagaaagttaatgtcataaaggtgaaacctggttctttagaaactacaaaagagaaaagaaaaattagtattgaaaatggattaataaaaaaggttgaagaagaaggagaagttattaataaaatagcagtaatagaaagacataaaaatagtggaaaacactgtataggatttattgaaggtttaggactaagaggagcttcaatagcgcaaacaatcgctcatgactcacataatatcatcgtggtaggtgataatgataaagatatggagattgctgtaaatagtattattagtaaagatggaggtattgtcattgtgtcaaatggtaagttgctgaattttttaaggttaccaataggtggacttatgacaggtgaacgtccggaaattgtgattgataagattagtaatttaagtttgctagcaagaaagcatggaattaaaaaggaaatagatccatttttaacattggcttttatggcattgccagtaataccatatttcaagataactgcaagaggcctatttgactttagtagttttagatttatagatttatttgctatttaaaatgttacaagaaagatgggattaattatgtctgatgacgttaaagaaaaaatactaaaggctacaatgaaagtggtttcaaaagagaaaattagtggtactcgtatgcatatgattgccaatgaagcacatatgagtcaagcaaatttacattatcatttctcatctaaaaatgatatattgatttctcttttagataagatacaagaagaattttctaatgatcgaaagaattatattaatttagaaaataaaagtgtagttgaaaatatcagaggtttttttgatcaaaaaaagaatgatattctcaataaaaaggaatttgattatacgcagattgattattgggtgcaaggaacagtaaatgaagaaataaaactaaaatttaaaaatacatttgaaatttggcgtgacaatattcgtgaagttttatataaaggtgatcaaatcgaagataaagataggatgaatttagacatgttaccgtacttagcagtgtctttaatgctaggtgcttcactgcaatatttaattgatgatgggaaatttgatctagatcaatattttgatctagcagaagaagtgatatttgggcaaattcaaaaaaataacaagccaatttaccttagcataaagtaattaaatttttagtaagataagaattaatttaataggaggaattataatggaaaaaatattatggaaagaaaatacattgcctaaaactgataaagaagaaagtgtaaaatttcttaataaagaagaagtatcaaaggcaaagaaatttcatgaaagttttttagaatatgatgaaacaccattaatagatttaaaagagttagctgaaaagattggattgggaggaatatatttaaaggatgaatcttatagatttggattaaatgcatttaaagtgttaggcggctcatttgccatggggaaatatttagcagaaaagttaggtgaggatatagacgatttaccatatgaaaaaatgatttgtaaggaagttaaagataagcttggagatataactttcgtaacagcaacagatggtaatcatggaagaggtgttgcatggacagctaatagattgaaacaaaaatcagtagttttcatgccaaagggttcctcaattaaaagattgaataacataaaggcagaaggcgcagaagctagtattacagaactaaactatgatgacgctgtaagactcgcaaataaatatgcagaagaacataatggcgtaattattcaagatactgcatggaaaggctatgaaaaaatacctgcatggataatgcaaggatatggaacaatggctttagaagcaagtgaacaattaaaagcacttaatgttttaaagcctacccacattttcgtacaagctggcgttggatcactcgcaggagctgttcaaggtttctttgcttcgcaatatggagacgactgcccaaaaactgtagtagtagaatcaaatcttgccgattgttactataaatcagcaatagcaaatgatggggaagcaagatcggttggtggagatatgcaaactattatggctggacttgcttgtggagaagttaacacaattggttttaccatattaaagaattattcaaaggcatttatttcatgccctgattgggtagcagctaaaggaatgaggattcttggaaatccattaaagggagatacaggcgtaatttcaggtgaatcaggagcagtaacggctggtgctttatatgaaattatgactaatgatgaatataaagatttaaaagaagatttagagttaggtgaaaattctaaagtgcttttatttagtacagaaggagatacagatccagagaaatatagagaaatagtttgggatggtaaatattaataattgggtcacaatgaatgttttatcaagtgaaacttgattcagatggggtttgatccaaatctgagttgaacttatatcctcaaggggtatctcgtctagggttgtaccgctgttatcgcccacttatagaaaagcagatattccaaatttgcaatttggcatagtcgctttcacaaagtgcgtgggagtgttacagtgtctagacatcagataaataccaaagtagagttcaaaataaaaaaaggcgaaagctagtataaaaaggtatggaggagtttttatgaaaattgtaggtaatggaagactaataactcaaaacaaggaaaatccattttttgaaaatggtgcattagttataaatgatggtaagataattgattatggaaatactggtgatatcttagataaatataagcaggcagaatatatagatgcaaaaggaaaagttattatgccaggtcttataaatactcacggacatatatatagcgcctttgcaagaggtatgaatttagatggtccaacatctaaaaacttcttagatatattaaataatttatggtggagattagataaaactttatctctagaagatataaagtatagtgcttacacaacattaatggatagtttaaagtttggagtaacaacattttttgatcatcatgcaagtccaaatgctgttaaagacagcctttttacaattggaaatgtagcagaagaacttgggataagaacttcgctttgttacgaagtatctgatagagatggagaagaagttttagaaaagggaattaaagaaaatgtggattatataaattattgcaatgaaaagcatgataatatgaagtctgcaatgtttggaatgcacgcaagctttacactatctgatgaatccttaaaaaaatgtgtaaaggaagctgaaaaattaaattgcggatatcatattcatgtagctgaaggattagcagatgaagagcaatgtgtggaaaagcatggcaagagaatagtagagagactaaatgattttaatatattaggagaaaaaacaattgcagtacattgtgtacatgcaaatgaaaatgagcaagaattacttttaaatacaaatacgtctgtagtgcataatccagaatcaaatatgggcaatgcagtaggtgtatcaccagcacttgaacttataaagaaaggtgtaactgtgggacttggaacagatggttatactcaagatatgtttgaatccatgaaggttgcaaatataattcataagcataatttaaaagatccatcagtagcttggggtgaagtacctttaatgctatttgaaaataataggagtattgcagaaaggcattttgcaggaaaatttgggattattgaaataggagctaatggagatgtgataatagtagattacaatccattaacaccaatgaatgaaagtaattacaattcacatatcttatttggaatgatgggaaaatctgtggatacaactatagtaaaaggaaatgttttagttagcaatggtaagcttcttaatgttaatgaagatgaaatattaaatgaagctagaaaagtaagtcaaaagctatgggatagaatttaatcaaaaaatattttggaaatgaacatctttgttaaaagtaagtgtaataaaaaataaaatataacaagattaggagaattaaaaatgaaaaaaataattaatactcaaaaggcaccagcagcaataggaccatactctcaaggagtggtagttcaaggattagtatatacttcaggtcaactaccattaaatccggaaacaaaagttttagaaactgaaataaaaacagcgactagacaaagtttagaaaattgtaaagccatattagaagaagcaggtacaagtatggagaaagtatttaaaacaactgtatttgtaaaagatttaaatgattttgcagcggtaaatgaagtttatggaacatattttaaagaaaatccaccagcaagaagttgcgttcaaattgctaaattaccaatggacgcagttattgaaatagaagtcattgcaacaatggaataatattacgatagatttataaaaagtgataagagaatggtgagaatattattaagagaatatttacggtggaaggtgaaaaaatgtttgaagacatatacaagcaaatattaattgaagttaacaaccgtaatcagtgcgtaatgttaacttatcttgatttgcatagtgcaagacaaggttccattgtcagaaaagttatcttaacaaaggaagatatagaaaaaaagtctctttcacttaatgactatattcacgaaaaaatatgtagttgtttagaaagtgggaaacttgaatcttttaatatagaagaaaatgagactattttaattgaaccattcatccccaaaccacgtttaattgtttttggtggtggtcatatagcaaaacctttatcagaatttgcatcaagagcaggtttctctattactgttatagatgatagaccttcctttgctaatacagtgcgatttcctgaagcagaaaaagttatttgtgaaagtttcgagaaatcctttgatttaattaacttaaagaagtccgattatgtagttattataacaagagggcatagatatgatggagttgttttgcgtaaagtcttaaatcatgaccttagttatgttggaatgataggctcaaggcgcagagtaaatgctatgagaagcgagctattagaggagggcttttctaaagaaaagcttgaattggttaatgctccaataggtatagatatatatgctatcactccagatgaaatagctatttctatagtagcacagcttataagctttaaaaataagggttctatgagtaagtttggtaaaaatttcgccattccagagtttgatgcagaaatattagaaaatatatctgaaaaatcatcagaacctaaagcacttataactatactgtcttctaaaggatcagttccgagaaaagcaggagctaaaatgttgacttatcctgatggcagaactatcggaagtataggcggaggatgcagtgaatctggtgtattgcaaaaggcaagagaaattatgcgagaaaaaggtttttatatagagcaagttgacatgaccggtgatgtggctgaatctgaaggtatggcatgtggtggaactatggaagtgctaattgaaataatttagggaaagttaattttttaacattaattaatactaaattttattgaggaggttgattatgtcacaaaataatattaaaaaagatgacaaagtaaatgaaatgctaccagtaagtcagcttgctattttaggattacaacatgtactagcaatgtatgcaggtgcagttgcagtaccattaataattggcggtgctgtaggtctaacacccgagcaattagcatttttggtggctgcagatttatttacttgcggtattgcaactttaatacaggcgattgggataggtccgtatgttggtattaagctgccagcaattttaggttgtacatttgctgcagttggtccactaattattattggtaaaagtttgggaatgcaaacagcgtatggttctataatagtagccgcaattattgttgtattagtagcgccattgtatggaaagatattaaagtttttccctactgttgtaacagggacagtagttacaatgataggtctttctttagtaaatgtaggggtcactagtattggtggcggttcaggagctaaagattttggaagtgtagacaaccttatactaggatcatttgtaatgatcattgttttaatatctaataaatttctaaggggattttttcaagcaatttctgttttaaatggtattattttaggaacaatagttgctgcatttatgggaaaagtagatttttcagtagtaacaaatgcaaaatggataagtattgttcatccttttaattttggattacctcaatttgatattggttcaataattatgatgacattcgttatgttaacagtaatgattgaatcaacaggtacatttcttggaattggcaaagtctgtgaaaaggttatcactgaaaaagatattgtacgtggacttagagcagaagcaatttcaacatttttaggaggcatctttaattcattcccatatacaacattcaatcagaacctcggacttttagctttaagtaaagtaaaaagccgctttgttgttatagcatctggtattattcttatttcactaggattgattcctaaatttgcagccttagctactattattcctcagcctgttataggaggagctacaacaataatgtttgcaatggttgcagtcgcaggttttcaaatgcttcaaagtgtagattttaataataattcaaatatgatgattgttgcttgctctattggtataggacttggaattactgctgtacctacgttacttgaccaaacaccgacatttttcaagtctatttttagtagtggtatagtttcggcatcagtaactgccgtaattcttaatgcatttttgaatcatggtaataggaatattgaaagcaatataaagcaaaattcggtttcagaatgaattttacagatatctagcatgcaacttagagttatttgataacttaccaaaatcaaatacatttttgtttcttaggactatgaaaatttaaatggaagcttacaccaacattagcttgctcccaatttcattgtgaaaagctaatgtagacaagcttccattaagtactttttagcagcttattttcaaatgccttctccacaaaaatttacttgatttatagtaaagatatgaacttaaagttttagcaaatttgtaaatatgttcatctaataagtctaattcttaagttgtttatctataaattaaaatgttagaagctatacttagcaagttcttttgagaaataatttgctagaaatcatttacagatttatactatttatagtaaatattgttaaaggatatgagatgggaggttatttatgtttaaattaaatataaatggtaaagatgaagtatctgaaattgataaatctttaatgtcttttttaagagatgatttgagaatcacttctgtaaaagatggttgcagcgaaggagcgtgtggagcatgtaccgttttagtagatgggaaaaaagtcaaggcttgcctccaaaagatatcaaaatttgaaggaaaaaagattttaactgttgaaggattaagctctagagaaaaggaagtttatgaacattgttttgcagaagcgggcgcagttcaatgtggtttttgtattcctggaatggtaatctccgcaaaatccttattagatacgaatcttaaaccaacaagaatagatgtgaaaaaagcaattaatggaaacctttgtagatgtacaggctataagaaaattgaagaagctatattaatggcggcagaatattttagagacaatcttaaaatcccaactgctcctactgaattgaaaatggcacagaaatttaaacgtgttgatgcagctgaaaaaataaatgggacaggtattttcgtagatgatattgaaatacctggaatgttatatgtaaaagcagtacgtacaaaatatccaagagctattataaataaaattgatataaagaaagcagaagcacatccagactgcgcaaaagtcttaattgcaaaagatgttccaaacaataaaattggacatataaagcaggactgggatgtaatgattgctgaaggagatacaactagatatgtaggagatgcattggcattagtagcaacttaccataaagacaaacttgatgaagtatgtcaattagttggaattgactatactgaattggaacccattacttgtccgacagatgctttaaaggcagatgcacctctaatccattctgatggaaatattatgagccgtgatattctaaaacggggtaatgctaatgaagcaattaaaaattctaaatatgttgtaacaagaaaatataagacaccatttcaggaacatggatttatggagccagaatgtgcaatcgccatgcctgaaggagaagatggcatattgttgtattctggttctcaatctgtttatgatgagcaacgtgagatttcaaatatgcttaaaattccaatagaaaaggtacattgtcatgcacaacttgttggaggcggatttggtggtaaagaagatatgagcgttcagcatcatgcagcattaatggcatggtatacgaaaaaaccatgtaaagtaaaattctcgagacaggaaagtctggattatcatactaaacgtcatccaatggaaatggagtttacaacagcttgcgatgaaaatggttatttgacagctatgaaaggtgttattattgccgatacaggtgcgtatgcatctcttggtgggcctgtattacaaagagcatgtactcacgcacctggaccatataattatcagaatattgatatcttgggaatgtcagtttacacaaacaatgttgtatctggcgcatttagaggctttggtgtaatacaaagttgctttgctactgaaaataacattaatttacttgctgaaatggttggaatttcaccatgggaaattcgttatcgtaatgcaattcgtcctggggaggttctgccaaatggtcagatagcagatgaaagtgttgctatggcagagtgtttggaagctgttaaggatgtatatgaatcaaatccatatgcaggtattgctattggattcaaaaatagcggaactggtgtaggaaataaagacattgggcgttgtattttatcaattgaagatggaaaagttcatattcgaacttctgcagcatgcatggggcaagggattgcaacaatgtgcactactgtattatgtgagacaactgggttagatccggttcttatcatacacgaaagaccagatactattcgtacacctaactcaggaactagtacagcttctagacaaactgtagtaactggagaagctgtaagacgagcatctgaaaaattgaaagcagaattagataaaggcttagggattgatgatttagaaggcagagaattttatggagagtattctgcgaagacagacccaatgggatctataaaagaaaatccaattagtcatgtaagctatagttatggagctcaagttgttattttaaatgaagaaggaaaagttgaaaaagtagttgcagcatatgatgttggaacacctgtcaatattcaatctgttgaagggcagattgaaggtggtatggttatgggattaggttatgctttgacagaagaatttaaaattgaaggaagttatcctaagacaaaactaggcacactaggacttatgagagcgactgaggcccctgagcttgaagttattcttgtgcagagcaaaaataaaattccagagacttatggtgccaaaggttgcggagaattatgcttgattccaacagctccagcttgttctcttgcttattacagattagacggaaaattccgcgctcagttgccactaaaagatacattttataaaaaacaaaagaataaataatatataaaagcaagtatttattcttttgctgttaagaaaggaagattcttagatgaaaactaatggcattatagtggctgctggtttatctagccgtatgaaggcatttaaacccctcctgaaattgaaagaaaaaactataattgaatacagtattgatagtatgcttaatgctagagtgaatcaaatcgttgtggttttgggatttaatgctgaagaagttgagactttactacgtaataaatatgattgttcacaattaacatttatatacaatgaaaaatatgctgaaacggatatgcttgcatctgttaagcttggagtattagcattggataactgtgatgccttttatcttcttccgggagatatgccagcaattaaaacaaaaactttccttatggtaaaagattcaataagcagaacaggtgctatggtggcttttcctactattaatggacaacgaaaacatccacctttgatttcttggaaatgcatagattttattattaattttcacggagatgggggtcttagagaattatggaatcagcttgaagaccaaatagtaatagttcctgttgaggattttgggtgtacgatagatgcagatacaaaggaagattacaataggttggtacattatatggatgaaaggaattgagattttaatatattaaaattggattttaagtaaggaaatacattgcaaatatttttgtaagataacataaagttaaagactttgaaattttgcaaaaaaataattagtagatatatgggaggcgctatgcatggaaaaaataagtgaatctgtaaagaaaaaggatcatgaatctaaaataaggggtagtgctcttttcgtggatgatcgtgtgatggatggtatgctttatggtaaactactgcattcagcaaaggcaaaagcacgaatcaccaatatttcgattcctaaattaccggaaggttattttgttgttgataataaagatgtaacaggcataaaccgtgtccatattgttgaggatgatactccggtttatgctgaagatactgtagagtatgttggtgaaccgattttaatggttgttggacctgagtttaaagaagttgaaagaatcttaaatgagattattgtagcatacgaagaagaagttcctattttggatatgcgtaagtctgatacagtttttttccattacaactatgcaaaaggggatatagataagacgttaaaagaagctgatcgtgttttcatagaaacatttcagactggatatcaagaacaagcttaccttgaaactcaggggatgattgcttatccccatgatggaagaatgactgtacgaggttctatgcaatgtccatattatgtctatggagcagtttcaaaagcattgggttatgaatcaaaggatatacaaataattcaagatgttactggtggaggatttggaggaaaagaagcatttccttcaatacttgcctgccaggttgcagttgctgctaaaaaggccaatagacctgttaaggttatatttgatagaagagaagacatggagtttacttcaaaacgtcatccatctatatctacctataaggtagctattaagaatggcaagattactggcatggatattgatgttttatttaatagtggtgcatacactacactttccccagttgttttacagcgtggcttaatttgtgcaaacggcgtataccgtgtagataatctccgcgttgtgggacgtgctgttaagaccaatactgtaccttgtggcgcataccgtggatttggtgcaccacagacgttctttgcagtagaaatgattatggatcatattgcaaaagaaatgggtgttgattcccttaagcttaaggaagaatatattgttaaacaaggtgattctacgtctactagtggcaaatatcatttctatgtacctctacctgaaatgattgaacagattgataaactttgcaattaccgtgcaaaacgagaccagtataagattcaaaatggcagatatcgtaaaggtattggaatgtctttatttttccatggatgcggttttactggcagtggagaacgtgatttcattaaagcaattgcaagaataaggaaaaattcagatgatactgtagatattcttgcaagtaattcagatataggtcaaggtcttaaaactactttctctaaaattgttgcggatacccttggcatttcttatgaacaagtatttatcaataatccagacacagatcttgttcctgattcagggccaactgttgcaagtcgttcgcttatgacagttggagaattattaaggcgtgcagcagagagacttaaaaaagaatggaaagcaggagaagttcaagttatagaagaacatttcgttgaacctgattttgtgattccattcagtcttgatgaatttaagggagatgcatatccaacttattcttggggagtaaatgctattgaagtggaagtagatacacttactgccactacaaagatactaggagcatggggcagctttgatgttggcgttcctattgatatgaatattatacaaggacagatgcagggcggattccttcaagggattggatatgcatctatggaacagatggattacaacgataaaggtgtgattcgaaataatagttttagtgattacattattcctacagcagtagatgtaccaaatctagttactgaaataatcaataatccatatacacatggtccatatggagcaaagggtgcaggtgagttacctctcgtaggtgcggccccagcttatgttgaagctatggaaaatgccattggtggaaacttaaataaggttccattcacaacagaagatacaatgatcgttttacaggaggtgcataaataatgataaaatttattcttaatggtaaagaggtcgcatcaaattccaaagcaaatgagcgtttactagatgtacttagaaatgaatttcgtattactggcgtaaagtgcggttgtaaagaaggtgaatgtggagcttgttctataattcttgatggcaggttagttaattcttgtatggtggctatgggcagtattgaaggcagtactgttgtcactattgaaggctatagagaaactgaacgttttgtagttattgataaggcatatgcatcagtcagtgctgtacagtgtggtttttgtattccaggtatgatccttgcatctgaatgtatccttaataagaatccaaatcctacagaagcagagattcgcgaaggtatttctggaaatctttgtagatgtactgggtataatgccatagttaaggctattggcattgcagcaaaggaggggaaaggattatggtagattgttataaaccaacatctttaaaagaagcattggacatcctagcaaaggaaagtgttacaccttatgctggaggtactgatttgatgattaaaccagatgaaaatgccacatatttattccttgataaagtagcagaaatgaaaaatattgtagaagataaagaatatattcgtattggtgcagcatgtacttatactgatattattgaaaataaacttattccagcagtactgaaagaagcagtttcacagattgcagcaccagcaattcgaaatattggtactgttggtggaaatatatgcaatggttctccaaaggctgatagtgcactgatcttttttgccactgactctaaactgcgtcttgcaagtaacagaggggaacgattaattcctatttctgacttttaccttggaagaaagaatactgctattgagaaagatgaactccttgttgagattctaatgaataagaataatttaaataattactattacaagaaggttggtgaaagaaatgctttggcaatttcaagggtctctttcgttggcatcattaatatagttgatgataagatttttaactgtaggacagcatttggcgcagtaagtgatgttgttataagtcgtccagatattgatgcaatgcttataggaaagactgctgaagaggctaaggctctcaaggataagtatctagcagcatacgaaaaggaaattgttccaataaggggtagagtatctgcaaaatacagaaaaactgtgtgtatgaatttactacgtgattttcttgaaagtaatggaatttaactcatataaaattctggcatcaaatgaaattttatttaggcgggatttgattcccgtctgaatcttagtggctagagataaggtaaagttaaatagaatataagcatttaatctcaacaggattgaatgctttttattattattattaaaattgttgataaatggggatatattttaaactgatataataataatccataatatgtatttttagggtttaattattttataaaaacgtgtagaataatattgtatgaaaagtaaaatataaccaattaatttggaagatgaaattggaatctaataactaaaatataagacactaattaatttgttaaagtttgaatgatatgtacaagcctatttgagttttgtggaagaataagataatactacttaagcagagcaagaggtatagatatgaagagtaaagggaagagaacaacaggcggtataattgttgccgcaggaaaaacatcagaaagaaatggattaaatccattattgaaaattggttcaattactgtagtaaaaagaattgttttaacttttcaaaaagctggaatttcaccaattgtagttattactggatataaagctgaagaaatagaacatcatttagctgattatggagttgtatttttgcgaaatgatcaatatgaaaactcgcgaaagttcgattctgcaaagataggactagattttttacagaataaatgcgaccaggtattattcactccagttaatattcctatgtttacaccagagacgcttcaaatgatgatagaatatgatgaaaaattactttcaccagcatatcgtggaaaatctgggcatccccttttgatatcgtctgaattgattcctaaaattctaaaatataatgggaatatgggattacgaggagccattgaaaatattggagttaaaagacaatggatagatgtagaagatgaaggtattctatatgatactgattatattgaccgattagatcaacttttaataaaacataataaacatatacttcatccctttgttaaaatcagcattgaaaaagaatccttgttttttgattcaagaacaaaattgcttctaattctgattcaggatacccactctgtacgaagtgcatgcaaacatatggcattatcttatagtaaagcatggagtatgttaaatcaattggaacaagaactagattatgcagtagttgaaagaaagcatggtgggagcaatggtgggaaaacttatcttacaaaagaaggtactgaatttttgaaaaaatatcagcaatttgaacagaatgtacaccaatatgcaaagaatgaatttgaaaggttattttagaagttgcaattaatctgatgtctagccgctgtaatactcccacttcaataagtgggagataacagcggcacgaccctagacgaggtacccattgagggtataagttcaactaagattcatttgatatttaacaaaattttgaaaaaaattttacttataatttattatacttatacaaaattaccaaataatgatggaggaacaaaaatgaaaaagattaaaactacagaagctgtaggtaatgtaatttgtcatgatattacacaaattatcaaaggagaaaaaaaagatgttgcgtttaaaaaaggacacattgttactgaggaagatattccagttttattatcaataggtaaagataatctttatgtatgggaaaaaaaggagggaatgcttcatgaaaatgaagcagcggaaattctctgtaaaatatgtaaaagtgactatatgagtgcaactaaggtgaaggaaggcaaaattgaattaattgcggcagaagatggtctgtttaaaattgatattgaaaagcttcgtaaaataaattctcttggcgaaatgatgattgcaactcgccacagtaattttcctgtaaaaaaaggtgataaattagcaggcacacgtattattcctcttgtaattgaacaaaagaaaatggacgaggcagttaaattgtccggtgataaaccattaatggagattcttccatttatccacaaaaaagcagggattgtaactacgggtaatgaggttttctatggaagaattaaagatacatttgggcctgttattagagaaaagcttgcagaatataatgttgaagttttagggcagaagattctgagtgatgatcctaaattaattacagaagctataaaggattttattaaagaaggtgcagaattaataatatgtacaggcggaatgagtgtagaccctgatgatacaaccccaactgcaattcaaaatacaggcgcaaagattgtttcctatggtgctcctgtgcttccaggtgcaatgtttttactagcatattacaatggtacacttccagttattggacttccaggctgcgtaatgtatgccaagaggactatttttgatttggttcttccaagagttatggtagatgacaaaataactttagaggatattgcaaaccttgggcatggtggattgtgtctttcatgcgatatttgtacattccctaattgtggttttgggaaataagactaacaaagcttaatcaagtgaaacttgattaaggtggggcttgatcaccatatgaatattagataaatattacaaggtcagcctgaaagtgttcctatggctcaatatcttggataagtatttaaaaattatctgtgataaacttggttgatatgaggtgaataaaatggtagatagtagtggtagaaatattgaataccttagaatttctgttacagatagatgtaatcttagatgtgtatattgtatgccggaatgtggaattgaaaacttagaacatgacgaaatacttacttttaaggagattatgctaatagttaaaactgtttcacagcttggtattcacaagatcaaaattacaggaggagaacccttagtacgaaaggggattgtaaatttagttagaagaatcaaagatattgatggcattgaagagataacaatgaccacaaatggcgtactttttggtgacatggcagatagtttagctgaagctggtcttgatagtgtaaatatcagtcttgatacattaaatagtacaaactttaataaaattactcgtagagactgcttagataaagtgaagtttggattgaaaaaagcagtggagcttgggttgaaaacaaaaataaattgtgtcccaatatctcagttaaatggtgatgacttaatagatatattgaaaattgctaaagaaaatccaatcgatgtgcgttttatagaacttatgcctattggttttggaaaaagttattcacctgtttgtaatgaacaaatatttgagcagatagaacagaattttggaactcttcagaactcaaaaattaaacatggtaatggaccagctgtgtattataatttatcagattttaaaggaagtattggctttataagtgcaatttcaaatgaattttgccacgcttgtaatcgtattcgtttgactgctgatggaaatttgaaattatgtcttcattataataatggagttgcattaaagcctcttctacgtagtggaataagtaaagaacaattaaaaagagttattgaaaatgcaatatataacaaaccaagtcaccatggttttaatagcagcgacacggaaaatatagaattaaaaaacatggttcaaataggaggataaatactgttggaaaagttatagcagtatgcatcaatagaatataaaaacttaggaagtataagataggagaataagaaaaatggaactaactcatataaatgaagaaggaagagcaagaatggttgatgtatctgaaaaacttgatactatacgagaagcagtagcaattggaacagtttcaatgaaaagaaaaaccattgaaagaataaaagaaggtactattttaaaaggagatgtattatcagtagcacaggtaggaggtataatgggtgctaaaaatactccacaaataataccaatgtgccatcctataatgatatctggctgtgatataagttttcgaattgatgttgaaaacaataaaattgaaataactgcaactactaagactgtagggaagacaggcattgagatggaggcccttactgcagtatccactgcagcattaactatttatgatatgtgtaaggctattgatagagaaatggttataaacaatattatgcttgttaaaaaaagtggagggaaatcaggaatatttgaaaggaagggattatgatgagtaaggttattgcagtgaatataagtgagaaaaaaggtgttataaaacatcctataggaaaaggtttctttagagttaatcatggtctcgatggggatgctcatgcaggagagtggcatagacaggtaagtttgcttggaactgaaagtattgataaaatgaaatcatcaggagtggaaggacttactccaggaaagtttgctgaaaacatcactactgagggaatagttttatatgaacttcctataggaacaaagcttaaaattggggatgttacgctagaagttacgcagataggaaaggaatgtcatttgggttgcgaaattagaaaattggtaggagattgtgtaatgcctagagaaggaatatttaccaaagtactagaagaggggtatattaaagctggagataatattataatagtttaaaataagaaaaataacaattcaagtgatatttttgaattgttatttttttcactatattaagctattccataaccatatttttcaaagatctttttacaagtatcagtaaataagaaatcttcaaatgcttttgcggcatcagcatttttactagccttaattattccgattggatatgtaatcggtgaatgcttgtcctcttctattgtttctataattttagcatctttactgcttaacgcatcacttttatatacaaatccaacttcagcatttccagaagtcgaccaggcaagtacttcttttacatcttttgcaaaaacaagttttgatgaaatagaatctttaataccaagcttagtgaaaacttcatcagcatattgtccagctggcacacttttaggttccccaacagctatctttttaaccttatcacttgttagatcagaaaggctggttatagtagtgtcgttaggtccgactaaaactaaatcatttttaactaagtcttttttagtattttcaagtaataaagatttgctgtctaatgctttcatttggctttgaccagctgaaatgaagatatcacaaggagcaccttgttctatttgttgctgtagagatccagaagcaccatagttaacagttaaagtaacatttggagcagtctttttatattcgtcttgtatatcggtcagtgcttcttttaaactagcagcagcggaaatatttaattctattgaagcttcagtagcagattccttttgtggagtagttgatgccttttgagctccgcaaccaataagtgacgtcattaataaaacagttactaaactaaataatcctattttccttttcataaataaaacctcacattcataaagatatttctattatagttatgttttgttgtgtttggatatgtttcaatgcgttttacttgttgcttattatactagcatttatttataagaaaaacaatatgtaattgtaaaaataagtacttgaatagtaatattgacaaaattattaggatatgattataattaggctaatagtaatgtgatgttacgttatgttttattagataaagatctcaaagaagagattacagaaatgtatgaccttctttgagatctttttttgcttatgtttaagaaaatatataattatgtaaaattaatatagcgtgtaatgtcacatctctatattgcatttgtcaggtagaaacagtgattacataaggttattgattctactcataatcttttataattatttcaagatatttttgactcattgtatttattgaaataataaatgattttataaatgtaatgctgatgtaaaattattttcaatttgtattgtcaaattataaattttaacataaaagagaaaatattgtaaaatggctcaaaataacttataatgtacataatcaatagtaacataacaacattgattgaatttaacttggggaggaaataaaaatgaaattaagtgcaagaaaccaattggcaggaaaagttattgaaattaaagaaggggcagtaaatgcatcagtaaaaatcgaaattgctgaaaatactataatatcagcaactatctcaatggatgcagtaaaggaactaggattaacagtaggatcagaagctacagcagtaattaaggcaacatcagtaatggttatggcttagttcgctctcatcttatactacatatgaaatcataatcaaaagaggatatcttaagctaagatattctcttttttactagcagcctactatatatatttagataaaaaatatatatcaaaaataattctttacatgataccggaatatgggtagtgcgtatatttatgatatctatatgaaatgttcggaatgattaataatgatctcaaagaggagaatgcagaaatgtagaaaactctttgagattttttgtttataaaagattaaattataatatcccaacaatagtatcttaaaaggttgaacaagaatggagtgattaatttgaaatttgttacattttccggaccaccatcatcgggcaagacttcagtaatattaaaggtaattgagtgcttaaaatcggaacaaagaaaatgtagagttgtaaaatttgattgtcttacaacttatgatgatttactttataaaaaggcaggaattgaggttatggtaggattatcaggaaatctttgcccggatcacttttatatcagtaatataggtgattgtgttaaatatggaacagagaatggtttggatttgttgataagcgagagtgcggggttatgcaataggtgctcacctcatattaaaggtattttagcagtgtgtgtaatagatagtctttctggagtaaacactcctaaaaagattggaccaatgttaaaatatgcggatattatagtaattacaaaaggtgacatagtttctcaggctgaaagagaagtatttagttttatggtaaaagaggctaatcccaaggcacacatagtgtatgttaatggtcttactggtcagggggcttatgaattaagcttaagcataaaaaaagcaaaatctattgagagtcttgaaggagaaaaacttagatttacaatgccttcagcattatgctcttattgccttggagaaacaataataggtgaagattaccaaactggaaatacaaaaaaaataaatttccaagaaattaaaggtaacagagaacttaaaaggagttattctttagacaataatagtgaaatatctgaaatagactgcacaatagttaactcattaacaattgtaggaggacatgataaaggtggaaataaagaagatattgaacttacaattaaagtaggagaagtaatttgcatagttggacctacaggatctggtaaaagtagactactcgaagatatagagtgtattgcgagtggtgatactccaactggaagaattataaaaataaatggagaaaatttaaattgcagcagactggttgcagagctttcgcagaatatgaattttgtaatggatgtatctgtagaagaatttataagaatgcatgctaaaagcaggaatgttatagaaataaaaagtattacagacaaaatagtaaaatatgcaaatgaactagcaggagaagaattcgctggggatacaccgataacttcattgagcggggggcaatcaagagcattaatgattgcagatacagcattattaagcatttctccaatagtactcattgatgaaattgaaaatgcaggggtagataggagcagggcattagaacttttagttaaagaaggaaaaatagtttttgtatctactcatgaccctatattagcattgcttggggataagagaattgtgataaaaaatggtgcgataaataaagtaatcacaacagttccaagggaaagagataatcttaagattatgaaacaaattgataataaaatgttagaactcagaaatgccttaagaagtggaaaagtaatagattgggacatgaaagaatattttctatagatattcaaatgcgactttagacttacgcaatagccaaccgaaattaggtgaactctgttgtttcggttgctatagaatacagctgtgaatttctaacatcagaagttgcaccatttctgcatgctcccgagttaagttcgtgacaagcaaaaatggaacatcttcctattaaaaataagtgaaaaaaatataagatggaggtttaaaaatatgggaaagataaaaaatattgttgataaatcagaatatgatgttcttggattgttaccgtgccctataaaagtgccaatagaaattggttttgatgaaatgataaataatttagaaagtgaatgtgattttaaatatcttgttgaaggtaatgctaattatgaggtcatgtggatggatgagtcttcatatattcctaaaaaagaggaattgccaaagattattataagtgccggagttaatagcttttatagaaaagattttagagttaaggcaatagaagagaaatactttaaggaagtcaaaagcatagaagatagaaaattaattgaaaatgattttagtgatccaaaaggtaattattatataatggcattaaatcatttagttatggcagtagatttaactaaattgaataatagaaatataccaacctcgtggggagaacttttgaatagttcatttaaaaaagaagttgccataagaggaaagcgaggaaagtattgtgaaacaacattgctagcgatatataaagattatggtatggatggaattatgaaattaaaagaacttgttggatttggcggacatccagctgaaatggtaaagaatgcagggaaaggaattgagaattcacctacaattagtgttattccttatttttatgcaaggctccttaaaaataataagaatgttaagattgtttggcctgaagaaggtgcaatagttagtccagtgacattattagtccaaaatgatatttcaaacatgttggaaaatgtggtaaattattttactagtgaacaagtacaaaatgtatgcaaagatgcagcactgcctcatccaatggattatttagagtatttaaaagaaaacaattataagttaaattggttgggatgggattttataagcaataatgatataaacaaattacttccaaagttaaataaatgtttctaaatgctagaaattctcacctctaaatgttagaataaattattatacggaggagggaagttctatgaataatgaagaatccctaacggcagtagatgtcgctgaactattaaagataactaaaaatacagtgtatgaaatggtcaaaagaggtgaattacctggatacaaagtagggaaaaagcttagaattgataaaaaggatgttgagaattacatcaatagtcaaaaggtaacaaaaggtagcaataatcagattaagatattaatagatgagccagtaatagaagaaaacctgaataatattaaaaaagtggaaaattcaaatgatattataatatcagggcaagatgtgattttagatgttttagcagaaaaaattatggaaaaggcaaatgatataagggtacttaggtctaatacaggaagctattcaggtctatatgacttatataatgataaaatttctatatcgtcagtacatttatgggatggagatactaatgaatataatactgcttttgtaagaaaactagttccaggtatatcttgtttaattataaacctggcttacagaaatgttggtttttatgttccaaaaggaaatcccaataaaataactaattggaaagacttgattaaagaagatatatccatgataaatagggaaaagggttctggaataagaattttgcttgatgagaaattaagagttaataatataaatagagaacaaattaaaggatataatattgaaaaacaatcccactctgcagtagcaagaagtattgcaagaggggaaggtaatgttgggataggaaatgaaaaagcagctaatcaggttgatgggattgattttattaaaattcaggaagaaagatatgacttagttatcaaggaatctgatttaaaatatcctatatatcaacttataattagaaccattcaaagtgaagagtttaagcgggaaattgaaagtttaggcggatatgatttaaaagatataggtaaaatacttgataaaacataaataatgatatagtataagattaatattataattttatgcaaaggcgcagtaattttactgtgcctttttgttattaaaaaataaggtatatgaaagaaaataatagatgatgattgattattttttgaatatatctaaataaaggagcgatggtatatggatgaaataggagtatttttaaacgaaaaagatcttataagttcttttgaagaagcacgatatgtaaaaatatttgcaaaagaaaaacatttgtggaaaacaaaaaaaactattttaattaatagggcaggtggtgaaaaatcaataaatgaaatcagacaggaatacaaaaatgtaattaatgaaatggacgattgtaaaattataatagtaacaaaggcttttggaattccgtatagtgtattttatatgggggattttagtgtttgggaattggaaggaaacccatttgattattttgatgaaattattaaaaatgaaatagtccaagaggagaatgaaaataaagaagttgaaattgctaagaaacttggcgatggatatttcatgatagatctacaggaattagagctgataaaccctgaaataacttctaaaaaggcaataattccttatttagaaaaagaggatgtaaaaaaaatagaagtacactgctgtcatgtaccaccttggctggttggaaaaatggacaagggtgaaatcttattatccattaatgagataaaaagaaatgattatatggtaactgtacagaaaaatgtttgaggcacatgaaagaaataatagactaggaggcgaatttatggagaaaataataactaagtatggtattttaaatgatgctattattgctgagtattattccactggggaaccagaagcgtataaggtggaagaatacagtgaattaaaagttttagactataatttagtaccgttgcatggatttgtagatgaaagaagaaaagaatttccaccagtaaaggtatttaagaatggcaatattaagagtatttcattaaatgatttgacagtaataaatactagtataggtgtatttgaagttgaaaaaataacattctatgaagatggtgaaataaatagattgtttcctttggatggaagattgtcagggtattggactgaagatgatgaatataaattggcaaaagcttataaatttagttttgatttttcatcatttgaagctaagattatgtctcttcatttttatgaaacacaagaacttaaaagtatcacattgtggccaaaagaaagaattaaaataaatgttggagaatataattttgcaggcagaataggagtctctttatataaaagtggaaaaataaaatcctgtgagccattaattgcaacaaatataaaaacgcccattggaaaaatcgaagcttatgacgttaatgcaatgggaattcatggggatagtaattctttagaattttatgaggatggaagcataaaatctcttatcacatctactaatacaattacaattaaaacatcggaaggtgacacgatttttcattctccaaaaaaaattagattgtattctaacagtgaagttctagatacgataactttaaaggtggaatttattgatgataaggtcataatagataaacaatatgaatatgagattaaagaaaataaatttgagataaaagcatttggagaaagacactttacccttaatggagatagaaataaataattctcattaaatttaacaaaacacgaatgattttgataaattgataaaaatatatcgttatcattagaaaagttatagaaaataaaaaaatagtttgcaatatcagttttttgtgatattatagtttcaataaataaaacaagcaaatgaaaaaaagaaattaataaaaaagtaattatatacaagtttttttgaaataatataacttaaattaaaaaaatattaacctgtcattaaggcaatggagtctaagtgtttaactcaatgaggaagttaacgacttagattttttttattctctaggaatttatattcaagctaaatctgtttacaagttatagaaaagactaattcagaaggttacggtttgtaaagagaataaaaaagaaaatatattcgcctgccaaatttttctcacatacgttcgaaaaggcagatgcgtaaaaaaaatctacggctccagagtcgcctgcgatttttttattacaatgaaaggacaaagaagtctattttattataactattaatagttaaataaattaggcttatttttttaaattaatttattgttatattaatacaaataagttataatgacccatttgggcttatataatatatttaattatgaggaggaaactaatatgagacaagtagctatttatggaaagggtggaataggaaaatctacaaccacacaaaatttaacttcagctttagctgaaatgggaaagaatataatgatcgtaggatgtgatcctaaagcagattccacaagattagttcttggaggtttagcacaaaaaacagttctagatactttaagagaagaaggagacgacattgaattagatgcaattttaaaaacaggatatggaaatataagatgcgttgaatcaggcggaccagaaccaggagttggatgtgcaggaagaggtattatcacttcaataggaatgcttgagcaattaggagcttatacacctgatttagattatgtattttatgatgtacttggagatgttgtatgtggaggttttgcaatgccaatcagagaaggtaaggcacaagaaatatacatcgtagcatctggagaaatgatggcattatatgcagcaaataatatttcaaaaggtattcaaaaatatgctaaaactggtggagttagattaggtggaatcatctgtaatagtagaaaagttgataaagaattagaccttttagaagcttttgcaaaagaacttggaagtcaacttatccatttcgtaccaagagataacatggttcaaagagctgagatacacaaacaaacagttatagaatttgatccaaaagctgatcaagcagatgaatacagaacattggctaagaatataaacgaaaataaaatgtttgttattccaaaaccaatgaaacaagaaagattagaagaaatattaatggaatatggtttaatggatatctaagataaaagcacaattattaatttacaattcacaattattgattaatgttgaagctcataaagaaagttttgctaaccaaatagaagattcccacaaggcgaaagttctgctatccaaatacaagatgcccgcaagtggaaagttctgttatccaaatacaagatttggagcatcactttaggagcatcacttttccattcaggattttttgaattcaattatttataatgtgaaatttaagttgaaaaatatataaaacaaaatattaaataaaaggagatagagagatatgtatatgattcgagcaataataagaccagaaagggttagtactgtgctttcagaattattggatgctggattcccagaagtaacgaagatggcagtttacggtagaggaaaacaaaaaggaatcaaagttggagaggtatattatgatgagcttccaaaagagatgcttctgattgcagttaaagatgaagataaagacgatgtcataaaagtaataataagaaattctagaactggagaaaaaggtgcatttggagatggaaaaatattcgttgcaccgattgaggaagtatacactgtaagtagtgggaaatcaggattataaaattgaaataggaggaatagctttatgaaagaagttatgtgtattattcgtttgaataaagttaataaaactaaagaagcactcgcagaagctggctttccatccattacttgcagaaaagtacttggaagaggcaagaaatcaattgatatagctttagttgaagcttacatggaaactggtgaagtaccgccaacatcgtatggtgagaatttatcagaaagaggaagattaatacctaaaagatttataactttagtagtaaaagatgacgaagtaaaaacagtagtagataccgtgataagtgtaaattcaactgggactccaggagatggaaagatatttgtattaccagttgaagaagtatacagagtcagagatggacaaataggtgaagaggcaatttaaagtgtggaggtgaagttaatgagtaaagttgatagtgttttggacaagtatagtgccaaagtatataaaaacagaaagaaacatatgcttgaacttgagcaggaaactcaagaaatagatgcaaatagaagaactataccaggagttatgacacatagaggatgttgttatgctggatgtaaaggtgttgttcttggaccattaaaagatatagtacttttaactcatggaccgataggatgtggatattattcatggggtactagaagaaataaagcaataccacagaaaggcgatggaaactttatacaatattgtttttctacaaatttaggtgaaagtgatatcgtatttggtggagaaaagaaattaaaggctgctataaaagaaattgtagagatatttaatccaaaagcaatatttatctgtgcgacatgtccagttggacttataggtgatgacttaccagcagttgcaaatgaatctaaagaattgtatggaattgatgttatatcattcccttgtgaaggatataaaggtgtatctcaatcagcaggacatcatattgcaaataacaagctgataaaatctgtaatcggaactatggattacacaccaaaaactcattcagttaatatccttggtgaatataacataggtggtgacgcttgggaaatagaaagaattctaaagaaaataggctatgaagttatatcagtcatgacaggtgatgctagcattgacgatataagaaaagcccatactgcagatttaaatctagtccaatgtcaccgttccattaattatatcgcagaaatgatgaaaattcaatatggtactgcatggataaaagttgattttatcggggttgattgtactgttagaactttaagagatattgcgaaattctttaatgatccagagttcacagaaagaacagaggctgttatagctgaagagcttgaagatattaaagatgatatggattattataaaagcaagttaactggtaaaaaggcaggtttatatgttggaggttcaagatctcaccattatcaaatgctattaaatgatttaggtgtagaaacattagttgcaggatttgaatttgcacatagagacgactatgaaggtagagaagtaataccaactataattgaagatgcggatttaaaaaatatcgaagtattagaagtagaaaaaattgaaggtaaatataaaccagttaaaacagatgaagaattagaagaattaaagaaagaaatcattaatttagaatattatccaggtatgatgcgtgacatgaaaaaaggttcgattgtagttgatgacttaaatgaatttgaaacagaagaatttattaaaaagttaaaacttgacatgtttttctcgggcattaaggataaatatataatacaaaaaggtggagtattatcaagacaattgcactcttatgattatagtggaccttatgcaggatttaagggtgctgcaaactttggtagagatgtaacaatgagtttatatactccagcatggaaatacactgtagctccatggaaaactgaatcaatattagaaggaacatttggaggtgaggtataatgttagatttaactcctaaagaaattaaggaaagaaaagcgattactattaatcctagtaaaacatgtcaacctgttggtgctatgtatgcagctcttggagttcatggatgtatgccccacagtcatggttcacaaggttgttgctcatatcatagaacagttttatctagacatttcaaagaaccagctatagcaactagttcatcatttagtgaaggtgcttgcgtatttggtggtggtagcaatattaaaactgctgttaaaaatatttttgatatgtataatccagaaataattgcagttcatactacatgtttatcagaaacaattggtgatgatttaaaaggttttattgatgctatagatattccagaaggaaaatatgtgttacatgcaaataccccaagttatgttggatcacatattacaggattctctaatatggttactggctttattaaaggtttatctaaaacaactggagtaaagaacggaaaaatgtgcgtgattcctggattcgttaaccctggtgatatgcgtgaagtaaagagattattaaaacttatgggtgtagattttacaatgctaccagatacaactggagttttagatgccccaatgactggaaaatatgaaatgtatccaaagggtggtacaaagattcaagatattattgaattaggtgactgcgaaaaaacattagcactaggaagttttgcttcagaagcaggagcatctactcttgaaaaatcattcaagattccatactctacattaaagatgccaataggtattgggtctacagatgaattaattatggaattaagtaaattcagcaagcaacaagttccttatgaacttgaagaagaaagaggacaattagttgatataatgattgactctcatccatattatgatggaaagaaagtagctttatatggagatccagatgtgctaattgctttatctaaattcttattagagcttggaatgattcctaagtatgtaattacaggaactccatcaaatgtatttgaaaaacaaatgcaagcattgtttgatgaatttggtgttgaaggctgcatagctaaacaagatgctgatctttttgaattacatcaattaattaagaatgaatctgttgatttactaatgggtggaactcatggtaaatacatagcaagagctgaagatatcccactagttagaattggattcccagtattagatagatatgttcattcatatatgcctaatgttggatatagaggtgctatgagattattagaattaatgcttggtgcattaatggatagacaagatagagacgtaaaagatgaagattttgaattagtaatgtagataaatatgtataattaccgaaatcataaatattttgattccgaaaaactatgaaaatatcgctgaaggttctaagcagcaggttgtatccaatttagcatgctccaactttcagtttgacaagctaaattggaacaacctacagctaagaacctttaacagctcattttcaaatgttttctccacaaatatatttatgatttctagtgaaaatatgaacttaaagttttggcaatttctaatgaagaaatcctacattaatattttaaatgcaacactgcatattatgacccttgtggttacaaaagagtaccagtcctttctggggtagtatatactcaaaagtttaaatttagatgttgatttatttatctaaaagagttgtgaagtaagtattaagtggaagggcgtgtactttggataagtgaaaatggaatgatttctaatgaagaaatcctacattagtattctaaatgcaacactgcatattatgacccttgtggttacaaaagagtacctatcatttatggtgtagtgtatactccaaaacttaaatttatttttaaaattatttatctaaaaatagtgtgtgaagtgagtgtttaataagtatttagtggaaagatgtgtattttggataaagttttcactgcaagttaagtgtaaatgttgatttatttgtttaagaaagtacccaccatttctggtgcggtgtatatctaaaatttaaatttgtttttttaatttatttatttggaaagagtgtgtgaaatagtataaaccaaatcatatgtatatgttgcaattcacaattgaggctaaaattcttgcaatatttttagaattatgatgacgaattagttttgcaacatatatacacatataaaaaaagcagctatgctgcaattaagattttaaaagatatgttaaattcaaaaaagttaataatttcaatgattgagcaattgaacatggataaagcatgtcaattgctctatctattaataaggcttttaatgcttattaatattgaaaattgagaatgtagaatgagtaataaatttagttataaggaatttgtaaaaaatgtattatgtgcattatttaaagtaaagttaactttcatcctttattctcaattctcaatctataattataaattcaaaaggtggtgtggcattatggaaaagaaaataagtaattcacttcttgaagaaagagaagattttgtgtgttttaaagaggggcataacaaaaaatctatgaagtgtgatggcgatagtgtatcaggatcagttagtcaaagagcgtgtgtatattgtggagcaagagttgtattaaatccaataacagatgcataccacatagttcatggacctattggatgtgctagttacacttgggatataagaggaagtctttcaagtggtgataatttatatagaaatagtttttcaacagatttaagtgaacaaaatgttatttttggtggtgaaaaaaaattaattgctgccatagaagggataatggaaaatcataatcctaagttgattttcgtttatgcaacttgcattgttggagtaataggtgacgatgttaaggcagtatgtaaaatggctgaggaaaaatacaatgtacctgtcattccagttatgtcgccaggtttttctggaaataaatctaaaggatataaattagcatgtaatgcactaatgaatttattttctagaaatattctccctaagagaaaaggaattaatatgttaggagatttcaatttagctggtgaaatatggattgttaaagagtatctaaagaaaattggagtagatgtgatatcaactattactggagattccagctatgacaaattaatcaaagctagcagcgcaagttttaatgttgttcaatgtgctggctccatgacatatttagcaaagagaatggaagcagaaatggacattcctttcgttaaaataagttttgtgggacttgaagatacaaaaaattcattactcagaatagcaagcttatttggagatgaagaaatgttagcaaaggctaaggcttttgttaaggaagaagaagaaaagatattgcctatattagaaaaatataaggaaaatcttagaggtaaaaaagccgcaatatatgtaggcggaggatttaaagcaatctccttaatcaaacagtttaatgaacttggaatagatacagtgatggttggaacacaaactggaaagaaagatgattatgaagttataaatagtttagttaaagatgggacagtagttttggacgatgcaaatccttcggaattagaaaaatttatgattgagcaggatgtagatattttagttggaggagttaaggaaagaccacttgcttataaattgggagttgccttttgtgaccataatcatgaaagaaagcatccacttggaggttttgtgggagctgttaatttcgcaaaggaaattaatctttcaattaatagtcctgtatggaagtatgtaaaggagagtgaagagaatgaaggaatctaaaagttatgtaaatctaaccgtaaatccatgcaaaatgtgtatgcctatgggagttagcaatgctttatatggaattaagaattgtatgactatattacatggatcacaaggttgtagtacatatattagaagacatatggcaacacactataatgagcctgtagatattgcttcatcttcactaactgaagaaggaactgtttatggtggtgaaaataatttaattaaaggattagaaaatttaattaaattatataacccagaagttataggtattgcaacaacttgccttgcagaaaccataggagaggatgtagtaaggctttcaaagatattttatgaaaaacatccagatagtaaagttaaattaataccaatacaatctcctggatatggtggaactcaatatggcggatattttacagcattaagggcagttgtagaaaatgtagaaatgtatccagataaaaatgaaaaggtaaatgttattgccgggccaatgagtagtgcggatatgagggagataaaagagatattggaggattttaaaattgattatatattgttacctgacttatctgagaatttagatggagttcatagcaaaaaatataataggcttccaagcaatggtacgagtatagaagaaattaaatttatgggtggtgcaaaggctaccattgaattaaccacatttattaaagaagaatattctgtaggaagttatttagaggagaattttggagttaagaattttagaattaatgttccaagaggtcttagagatactgataattttttaaaagtgttagctaagatatcaggaaacccaattccagaaaaatataaaaaacaaagaggaagatatttagatgctatgattgattctcataaatataatgcagaagctagaattgctatattgggagaacctgattttgtatactctactgcaagattagctgtggaaaacggagctgtaccagtacttattgcaagtggagatgtatgtaaaaaacttgaaccaagcttaagggaagaagttgacgaactttcaaatcagttatttgcaggtgaatgcaaaatcatagatgaggcagactttaaggaaatagaaaaattcgccttagatttaaaggtaaatgtaatgattggaagctcggatggaagaagaatagaggaaaaacataagattccattaattcgaatgtcatttcctattcacgataggatcggtggacaaagaatattatctataggctatgaaggatctttaaatttaggggatcaaattactaatgttatgcttgctaagactgaaatgacctttagagagaatttatacaatgaatattataaggaagaagttgaaataagtaataaagatatagcaattgagggggagaaaaagatggaagcaagaattatcagcagagaagaagtagaagaaaaaacaaaaactcatccatgttttagctgttcatcagctcacaagtatgcaagaatgcacattcctatagcgccaaagtgtaacattagctgcaattattgtttaagaaaatttgattgtgttaatgagagcagacctggggtaacaactgaagtattatcgccagaggaagcttttgctaaatacaaactcgtaaaatcaaaaatggacaacttaaaagttgttggaatagctggacctggcgatgctcttgctaactttgataatgttagggaaactttgaagcttataagagaacatgatccagaagttacattttgtttatcaacaaacggattaatgcttccattttatgctgaagagctgattaatttaggagtaagtcatgtaactgtaacaatgaatgctattgatcctaaaataactgctaaagtatataaattcgtagattacttaggggttacttatactggtgaagaggcagctcaaattctcttaaataaccaattatcaggtattaagtatttagctgatagaggaattatggttaaggtcaatatagtaatgcttaagggaattaatgatcatcatatagaggaagtaacaaaaaaagcaaaggaacttggagcaggaataacaaatataatgcaaatgattcctgtaaaaggaagtgtctttgaaaatatgcctcttacaagtaataaggaaataatggatttaagaaaaaaatgtggagagcatattgaacagatgtatcattgtaagcaatgcagagcagatgctattggtttacttggagatgatcaatctcaaaaatttaataagccatcaaatgtaaaggaagttacagaagaaaaaccactaaagtttgctattgcatcaaaaagtggaataggcgtggacatgcatttcggacatgcatctgaattttatatctatgaatataaaaatggagagccaagatatttggaaaaaagaaatgttgaaaaatattgtaatggtaaagaagtttgtgaggaagaggaagataagtttgctaagctttcaaaagttgtttcagactgcaatggagtactttgtcttagaattggtgatgaaccaaaaagaaaatttaaaagtatgaatatagaagtttttatgacatgtgaaaccattgaaacagctgttgaaaaagcagcagaagctatattaaaaggaactgaagttgaagaaatgctaagagcttaatgtgatatccaacgaaagaacaggtgctctgttgtttcggttgctagataatttggctatggatttctagaagcagaagttgcacccatttgagcatgcttcagctttcctgaggaagctcgactcatttcattcgctgaggaagttcgagaacccaaaataaaattttggactctcacttcacaagctcaaatggaacaacttctgcttaagaaatcctacagccatattatcaatgcaacactacacaaaagagtacctcttctttctggtatggaatatacatcaaagtataaatatttaataaaaataggagatgagtgaaatgatagatattaaacatcatatttttgtttgtgcaagttgtagagttaatggaatgcaaaaaggaatgtgttattctaaagattcggtaaaggttgtacaaaagtttatggaagaagttgaagatagggatttaataaatgaagttatggtaactaatacagggtgtttgggagtttgcaataaaggtcctatagtagttgtttatcctgaaggaacttggtatggaaatgtaaaggttgaagatgtagaaagaattgtagaagaacatatcgagggtggaaaagtagtacaagaattagttatttaaaaataattttatactagtccataaaagtgggctgtcgcactatgaactgctctctgtcaagcaaacagtgaaaaaataaaaatatttgataccgccaattacaaaagtattggcggtattttatgctgcagatttctgatagtatcgatggtataaggtgtcatatattttagaatagtattgttttactgcattaacaattcatggtataatgaaaaataattaattaaagccatagagagtaaatatctctatggttttgattttaatatagctctgttcatttaaaaagatttagatttgtttttgtttatgaatttaaaaaattgcttagatcataacgaatcaatgatgtaaggagatttgaaaatgataagtataactaaacttttgtgtaattctaataattatggagatagcttaaggtatgtagaaggtgcagccatagaaaagtatggggtgagtccaggaagaggacctgtagttgcttggaactgtacaaaaacttgtaatttaaaatgtaaacactgttatgcaagttcagataataaaagatatgatgacgagcttacgttagatgaatcaaaaaagttcatagacgatttaaaagattttaacgtaccagcattattgttttctggaggagagcctctgatgaaggaaaacattttggaattattagattatgcaagtcaaagaaaaataagaagtacaatatctactaatgggactcttttagataaagatgtttgcaaatctttaaagaaaataaatcttgggtatgtaggtgtaagccttgatggtataggatcaaatcatgatgcgtttagaggtgttaatggtgcttttgacagtgctttaagaggaataagaaattgcattgaagttgatcaaaaagtaggtcttaggtttactataaataaaaataattataaagaattggaagatatatttaagctaataaaagaagaaaagatacctagagtgtgtttctatcatttagtatattcgggaagaggaagtaaaatggtagatgaagatatttctaaggaagaaacaagacaagctctagacttaatcataagtaaggcaatagaatttggtccaagtgttgagatacttacagttgataatcatgcagatgccgtttatacatatttaaagtcattggagaaatttaaagataaatcagataacatattaaaacttttaaagactaatggtggaaatagatcaggaatggcttttgctaatgtagacttttttggaaatgttcatccagatcaatttacttggcaacatacttttggaaatgtgaaagaagaaaaattcggatctatatggagaaattctgaaaatgaaatattaaatggtcttagaaatagaaaaaaattattaaagggtagatgctcttcttgtaaatggttaaatgtttgtaatggcaatttcagaactagagctgaagctgtacataatgatttttgggcagaggatcctgcttgctatcttacagatgatgaaattaatattatgaaataagaaatacaaaagggtatatgagattttatgtaaaggtgagtgaatgcaaatgataatatcatggaatactacaaataaatgcaatttaaagtgcagtcattgttatagagattcaggcaaagaaagtcaaggtgaattaaatacagaagaagcaaagttacttatagatcaaattgcaaaagctaattttaaaataatgatattctctggtggagaaccattaatgagagaggatatttttgaattaataaattatgcatccaaagctggcttaagacctgtccttggaacaaatggcacccttatttcaagggaaatggcagaaaaattaaaagctgctggtatttctgcaataggcataagtcttgatagtcttgattcaaaaaaacataataaatttagaggaaatgatgaagcttttagagataccatttatgcaatgaaaaattgtagagatttaggaattagatttcaaattcatacaactgtcatggattggaataaagatgagataattagtttgactgatttttcagtagctatgggagcagcagctcatcatatattcttccttgtacctacaggaagaggaaaagatatagaagatgaattattaaattcaaaagagtatgaagagttattaacgtcaataatgaaaaagcaaagtgaagtaaacatagaaataaagccaacttgtgctccacaatttgttagaattgcagaagatttaggtgtaaatagtagatttaaacgtggatgtattgcaggaacaagctattgtattattaatccaaaaggagatgttcaggcttgtgcttatttaacagaagtggctggtaatataagagaaatcccatttgatgaaatatggaaaaatagtgaattactcaataatctaagaactcaagaatataaaggaacttgtaacagttgtaaagataaaaaaagttgtggaggctgcagagcaagagctgcatattataatgacggagattatatggcatcagataaaatttgcatttttaataattaaaggcaaggattttatttgacattccaaaactttaagtgaggaggaactgctatggataaaatagataaagaattgcttaatttaatgcaaaatgaaattccaatagataagaatccttttaaaatactaggggaaaaattattacttacagaaaatgaagtattaaaaagaataaataagttaaaaaatgaaggaataataagaagaataggtggaatttttaattcgagaaaaattggatatacaagtactctttgtgcagctaaagtgcctgaaaatgaaattgaaaaggttgcagaatatataaatatgtatgatgaagttactcacaattatataagagaagatgagtataatatgtggtttaccatgataacgcgttcagaagagaatttgattaatattcttgaagaaataaagagaaatactggtttggaagaaataatgagtttaccttcagttaagttatttaagattaaagtggctttaaatcttcaaggagatgatacaaatgattagtgattttgataagaaaataataagtagattgcaagaggatattcctataataactaatccgtataaggatatagctaaagagcttagtatggatgaagatgtgcttatagataaaatcagaaattatagtgaaactggaatattaaaaagaataggagcaatactttatcatagaaaagctggatttaaagctaatgcaatggtagtttggaagattgatgatgaaagattagatgaaattggagaatatgtggcatccatttctgtagttacacactgttatgaaaggaaaccttttggttcgtgggattataatctatacacaatgatacacgagaaagataaggaaagctgtaacaaaattattaagcagatagctgatgatataggaattgaaaattacaaaattttgtatagcacaagagaattaaaaaagactagcatgaaatatttcaaataaatatatatacaaagcattggttatgtgataatatatgtataaaatagcatattaacaaagacaatgtggtctaaaaccaaactaagaagttttgttttaggctattttttgttggcaagggagcctgtttaatatatataaatatattaagtaggctccttttagatagattatattcacatgtagaaaaaatttgcaattaaaaaggggtggaattatggatgaaagaaaaatcgaaattatagataggacaataattgttttgagagaaatatttggtgataagttaaaagagaaaagcgcacaggtaagagaattgataaaattactatatataataggaagcgattatatagaaattacgcaagagctttatgaagaactatcaccattgcctcaagatgtaaaattcataatatctaacaataataaaattgaaatagaaagtgttaatgtattatatgagatattagacaataagctaaatatatataacaaaatgaatgcaagaatagtaggacttgatgacattatcttttatgattatcagcagatttttttagagataataaagttctttggaaataatatagagctaagtataaaaaataattataaatcagctacagctatgagtttagaatgggttaaagctggagggaaaaaagttgtaacgacttttgcaggaattggtggctttgctcctcttcaagaaatattaggagggtcttcttttttagagaaaataaaagatcatagtaattataagctatttcccaaggtattaagcatatttgaagatattactgaaagtaaaatcagaggaaatgcaccttttataggaaaagatattttcaatgtagaatcaggaattcatgtaaatggtatagctaaagattcaagaacttttgaaccatatgaccctagtgaaattggaaggaaaagaaatattattataggtaagcattcaagtgtaaatgcattagaaataaaattagaagaactaaacataaaatacgagcatgataatttaacaattatgttggaagatgtaaggaaattgagcacacaaaagcgtggtggattaagtaatgatgaaataaaaagattatataagaaactgtgtgtttagattttataaggtggtgatatattgatttataatgaaaaattagacaatgaaatatatattgtggatacaactttaagagatggtgaacaatgtgcaggaaaagctttttcaattgatgaaaaaattgaaattgcgaaatatatggataaaatgaagatttatcagatagaggcaggcatacctgcaatgggagatttagaaaaagaatgcattaagcggatattagaaataagaaaaaattcattaatttccgcttggaatagaatgaataaaaatgatatatttcattcaatggagtgtaaaccagatattattcatattagcgttcctacatcggatatacaaatatattcgaatttaggaaaggataaaaagtgggttgaagaaaatcttaaggaatgtgtatttttagcgagggataaaggttatgaagttactataggttttgaagatgcttctagggcagacattagctatcttataaatttgtgtgaaataattattggtatgggcgtaaagcgggcaagatatgcagataccgtaggaatatcaatgccttcacttataaaggattcaattaaaactttagtaaacaataccggaatagaaatagaaattcatgctcataatgattttggaatggcgattccaatttccctagaggcagttaaaagtggtgctaaatatgtggattgcacgttgggtggaataggtgaaagaacaggaaattgtaatctacaggagtttttaaaaatatcaaatgcatttttaaaaagaaataaaaaaattgagggattgatttagatatatatgttgtaattcataatggacattttacaattcaaaattatggctaaaattcttgcaatatttttagaattatcatgaagaaatatttttgcaatatattattgtaataataaatttgtaagtggaactctattgagctaattgcctcaaatgagaataatgatgtagaaactcaattacaatatgttctagtataaaacatatctaaaaataattgagaaaattatataaataaaaaaagtgagcttgaaaatgtagatattatttcaagcttattttatttcttggtaaattatggataagtaatctataaattatgctcgtatttgggatagttatcaattattgctaaattattgtgtatttcatgtcaaaaatatatgtaattctagatatgtcatcacataaacctaagttcaaagctagatatctatatagataaacaacttattgagaatttgatttatactttgcaataaatacatactagaaagcagaaacatttttatgtagcaggcattgaaaatgagctgttaaaagttcttaattgtaggttgttacactaatgcttgtcacaatgaaattgggagcaagcattagtggtgcaacctgtaagttagaactttcagcgaagttttcatagtcctgtgaaataacaatgtttcttctttcggtggttcattgcataagtttaagttatatattgtttatctatattgaaaaaatataagttgcatagtattatttataaagtccaaaataataaatatgtttaaataaaattgtgttataatttattacataaattattgtaaattggcgggtgaacaagatgaagttggcagatgaaaaaaaacaaattatgagcaaactaaaaagtgaagaagtaaataatcttctagaaagatatagcatttcgagtatgctcacttttggaagttttaacaacgatgatttcactcaagagtcagatatagatatagcagtaataggtatagaaaatatacctttagataaaatattagaacttgaattatttttagaaagaactttgggtaaagaaattgatgttatagatttaagaagtagagaattaactatatttttaaagataaatgtattaaatgaagggaaaattatatattctaatgataataacattattttagaaaagtataaagacgaagttgatataatatatagagaaaatgagaatttcttttggtttagaagaagggatgtgttgtcatgaatcaagaaagacttataaagatagttgaagattttcaagagtgtataagtgatatcgatgagtgcattgagatattagaaaacaatagtgataataaaataatgattaagcttgcaaaatctagtttgagacaattatttgtaagttttaatacaatactagaagactttacatcggtaactcttaagtcattaaaaaagtataaaataggtatgactttaaatgatagtttggaagtgttaaaagaggaaaaggtacttgatgctgagttgtttaacttcttagaaaaatcaagacttcttagaaatagaatttcacatagatataaagaaccagcacatgcagaattatttgagcatgttgtaaagtataaagatgattttaagaaaattttaaatatcgcaaaacagtatttaaaagagtaagtaggggaaaagatgctagaagatttaatcagtgttttagataatgtaatatatttagatatagaaacaactggacttgatgaaacatgctcagaaattatagaaattggagctgttaaagttaagaatggagttataactacttataatacattaataagaccaagaggacgcgtgccaataagtatttacagtctctgcagtgatttaaaggaggcagatttactaagtgctagaagtttgaattcaataaaacaagaagtactggaatttttagaagatttacctttaatatgtcataatggaaattttgaaagaaaatttttatctttttatattcctgaaataaaaaatacaataatggattccatggaacttgcaataattttagaaccatggagaaaagaatataatttaaattctttaattaaagaaattactaatttaaataaagatgaattacatagaggactatcagattcaatagacaccttaaaagtagttaattcactacttttaaggcaatggaatagagaagaaaatagcagaaaaaaggataaatcgctacataatctaattattaaagaatatcagtatttacaaaaatggccatggactaagcatttattgaagcctccttttttcattgatgaaggttatacatatgtaaattacctagagaacaaagaagaggaacttaagctaaagaaaattcctatagattatttgaaatatgaagatttacttgaaaatgaagagatatggaacaatggtggggattttggataccagtatagaaaagatcaaaaggaatttgcaaaaaagataagagaaaactttgaaaaaggtgagagaatatttatagaggcaccaactggaagtggtaaaacttttgcgtatgtaataatagctgctattgaaacatatttaaataagcagaaaaatagaaaagatgatgctagctttattatatctacaaacacaaaggaattacaaaatcagcttattgagagagatattccgactatacttaaaaaattaagattagatgataaattaaattatggtgctatgaaagggaaaggaaattatctttgcatagaaagaataaatagatgtgaagaatttcagatggatgaaaaaggaaatctagcattgctttttctaagaagactttgtgaaagcggtaattatggagatatagaaaatataaattatctagtccaaaaacatttagaattggataagtacataagggaagttaattgtgatagtgaacaatgtaagcttgataaatgtacaagggcttgttttttgaggaaaaggtataatgagctgcctgaggaaaacatcacagttattaatcattctcttttagcatgctggccatatactgaaaagaaaaaaattaaccacataattattgatgagggtcataacttaatggagaagtgttatgatttttttgctgaggaattttcgtcagctgaatttatacaattgctagatcttatagaaaaaggtcacccgagtattatagctatgcttttaactttaaatgccagctttggttatagggaaaccatagaaaaagataaaattgtgtatttagcaaatgatattatagtaaatataaatatattattaaatgattttagaagcctgagacttatcagcggagaatataattttactactgaatttttcatcccaagagaagatttacaaggaataacaaatgccatagggtctgagatatcagttttgaaagaaagtatatatccactatataagatgttaaatgactatatttataatataactttagatgacgaaatagatggggatattgaccacaagaatttatccgattatatagcaaagcttaaaagtgcatttgatgttttagataagtttttagaaagctcagtgttctatgcaaaaatattagaagtagactcagaatataaatcattcatacttaaaaatgttcctttaaatgtaggagaaatggttaatgaacatatgttaaaagacgttaaaagtacgacgttcttatcggcaacattgagaatagaaaattcttttaataaaataaaaaagcatttaggacaggaaaaagcaaaggagtttataattccaccaacttttgatttaaagaaaagaactaaaatctttgctttaaaagatgttgggaggtatgatgaaccatcatatataaaaaatgtttccaaatttatttataatactgcattaaaaataaatggtcatattcttgttttattcaataataatgcaaggagaactgctgtgagtgaagagcttgagctgcttactagaggaacaaaaatagaagtacacatgagtaaaaaatcagtaagagctttaaatgataaaaataggcaagttataatacttggaagcaagggcttttttgaggggatagatgtacctggagacgcattaagctgtgttatgttagataaaattcctaactatagtccagaatatcctattttaagagcaattactacataccagaagaaggggtatcaggatgtgaattatccgcaggtatgtattaaagctaagcaaatatatggtagacttattagaagcacttttgattatggatatttcataattttagatccagggcaaaactcatatactataagaaatcttgaaagagatttaaatgggccaagtatagaattttcatcgactactaaagtgctttcagagatggagtttgattataataattggagaagaaacaatattaatacaatcataaataacattaagaaaagtaataaaagcattaaagaggaatttaacaatgaagcaaagaagcataaattattttgggaattactaaaagttgaaaatgatatgtattattttgaaaacattaattttaaattaaatggtaagatttaaaattaaatttaagtgataacttaccgaaatcataaatattttgattctgaaaagctatgaaaatatcgttgaaggttctaagcagcaggttgtatccattttagcatgctccaactttcagtttgacaagccaaagcggaacaacctacagctaagaacctttaacagctcattttcaaatgttttctacacaaatatatttatgatttctagtgaagatatgcacctaaagttttagcaactttgtaaatatgtcaatctaataaatagaattcttaaatcggttatatatatattacaattataggatgttttttggtagattattttgataatggtaaaatttttagaaaaatataagatttaaatgtaatatatgctataataaacgtatataaatataaagttaaaaatttattatattttaatatggaggtggtaataatataaataaagtaatttattttacaaaataagaaaattataatttagagattgaataaagagagggatgttaagggtatgatagaaaatataacacaattattacaagaatataagagtacaaaggaatcattagaatgtgggttgaaatggcttcctaagaatgattatgctaagtctaaaatagaagttataaatatggtcataagtgatctagaacaattagaacaacaacttagttaataaattaaaagtattaaagtgaaaattataactttaaagtataaaaaagttattaacatataataaaactgcctcaaagctgtattttgaggcagttttatttatatatattgcaattcacaattcacatttcacaattagggctaaaatttgtgcaatatttttagaattatgatgaagaattatttttgcaacatgtataatgaaatatatattatacaatcttaattttaattatgaccatacttcataaatagcttctgcttcttttattccttgattaaatccagcctttgcagatgctgtagtatgagttgggtcgtaaggattttttcctattgctaaaatactatctttattaggtacaataagggaaacagatgagcttttttgcatttcagcaacatcttcttcaacgcttggaactagaccatatttttggggcataggcgataaaattacaactttatcataagaagctgccaaatgtgcatttgtactcgaaaccattcccccatcaatccagtctattccattaaagtttactaatggccagagtcctggaactgcaccacttgcgtttactgcatttattagcgttgttcctgaatttttatcgagtacatggagattaccggtttttgcatctattgcagtgacctttaactttgaaggccagatagttgtggtgagccttgattcaacaactaatttacgttcttctattgatacttttgtaggatatttttttgcaatatctccaaacatctttccaatttcttttttattatctttaccatattgaaaggcttgggtccataacatcataagttcagaactaacagatacatttacttcagatgcattttggatgagttgagactcataaagttttctcatattgtagccacttgctaatgcggatccaacaaacgaaccagcagatgttccgattataacatctgcgtctgctaaattaattctctcttgtaacaatgccgcaattattccgatctcccaagcaattccggttactccgccaccacctaatacaacagctcgtgtttttttactaatattttgcatgataatattccccatttctttattatattaactagtaaagtgtttaaatatagtataaactatgaagtaatgtttatagtcaagggaaattagtgaggtattttatgaaaataaatgaagtgtcaaaaaaaactgggttgtctatatcgactattagattttatgaaaaggaaggattgattcctgaaaaatatgttagcaggaacgcaaataactataggagttattctgtagatataattgattatttattgatgataaaaacagttcattctgtgggtttttctttaagagagatcaaagagatacaaaaaagtaatgataatataatttcaattgatacaaagatcgaactcttgcaagaaaagataaaggaagtagaagagcaaaaagaaaatttaaataaaactgagatcatattaaaaaagatgttgaaaaataaattgaattcaaaactcatattaactgaaggatatatcaataaagatagaaattagttttaatagtttttcgaaaaactaataacactgtagatttgctgaaaggagcctttttttcttggtttctatcttaaatattatggtaataagtatttcttaggtacgttttattttaaataatataatttgttatattatttaaaaaaggggttatagcttactaatgatacggagaactatatcataggtgaagacttacttatcattattcataaatctattaggctaaataatacgaatttgagacattagacatattaaaatatcctagtaaagcttatttatgccttactaggatattttactgttacctttaaaaatattaaaggtgctaaaatttttatgcttaccatagaaaagcattatcactctttttgtattattataattagcgtatctttagtttataataattatattcgtggattatttactttaacagatttagtatttcatcctctgaaagtgaagaatcgcagcgaacctctatttctctatttttactaacaataaatcctggtacagttacaatattatatttttctctaaatgagtcaattaaattatctgaaaaatcagcactatccacgtagtaaattgttgtgctgattttattagtcaagccacttaattttttagcaaatctgcggcagaatgggcatgttgcacgaccaatatagataacagctaagtcttcattagataataattcttctgcttgtgtagaaatcactttttcaaataactttacattctcttcatagttatcttcttcaaacatatatatcctcctagttttttataatagtatatcaaaggcaaattattaaatcaatttagttagcttttctagtagttattttgtgaaattatagaaagtattataaaagaaaattctaggttaagagatgtaaaaagggtttaaaaagttttataattcactcaatcaaatgtttctgtaagaattattgtattaagtaaagcgggtgacgtataataagccaatttacaaaataattatggtatttaagtggaaataataagataagtaatatagtaaattaaaattgacaataattgaatttagtaatggtatatttgctataataaagaggttaggaattgattatgaacaaaaatattgctgaagagtacattacatgtcgctctattcatatttttcggtagtaatagaagcataaataggcttgatatttgttcgttagattaatacaaaaagtataattataaaactaagcatattaaatacttaaaaaaagggaggaaaataacatgaaactaacaatgtatggggcagcaatttgtccagattgtgttgaagcaaaagttattttagaaaaacataaagatatagaattagattataaaaatattactgagagtactaaaatattaaaggaatttttatcttatcgtgataatgataaaatgtttactaatgttgttaaagaggggaaaataggtatcccattttttattttagaagacggaacaaaaacgttagacatatttgatcatttggatatagaaaagcctaagaaggttgtaaatagttgctctatagatggtagtggtaaatgttaatagatgttaacttatagtgaattttaaaggtcaggcttcgccttcaccaagttaagacggcagcaaagatgccatttaaagagaagtaagagattttaaatggttgaaataaagggattttcgggatttgagtatagaagcacaagttttgaaaatcccttttttgatactttcgtggaaatacatccaataaagataatttatatagtaatgaagctaggttaagggatgtttatgtatagcagcagaatagataacatagtttgtgacagaacggattagatgttttataataactgtattgcttgtgaaagtagaataaaagatatgggtaaaggggtgtgaattttgaaaagagcatattattcaagcagcgtaagtgaatttatagaggaaaatgattttgccatatttggtgagataactagaaatgatcagtttgctgctgatgatttacaaaaaaacacatggaaaaaagaaattgaaatattaaaaagagatttaactgattgcaaagatggacatttactatttgaatatacaataccacgtataggaaatagaattgataatgtactgctttataatggtattgtttttctcttggaatttaaagtcggtgaatcaacatatgcgaattatgctattgaacaagttacagattacgcactggatttgagttgttttcataaagaaagcaataacaagctcttggtaccaattttaatttgtacacgtgctccagaaaaacatcaaacaataaaattaatgaaggataatattttagagccgtattgctgcaatgagtttaatattggtaagtatattttggaagtttgttctctttatcaaagagaacactttagtcctcatagttggataaattcattatacatgcctacgccaaccattattgaagcagctcaagcgctatatatggggcataatgttgaagatatttcaagaaatgatgcaagtgcaaaaaatcttaatcaaacaaaaaaagctataaatgatattattgatcatagtaaggcagacaataaaaaatctatttgttttattactggagttcccggtgcgggtaaaaccttggctggccttaatattgctattgaacgccaaaaggtggacgaaaatgagcatgcggtatttctctctggaaatggaccattagttgatgttttgcaagaagcattggctcgtgatgatgtgcaaaggaatagcacaagaaaaaatgaagctatgcgaaaagcaaaggagtttattcagattatacatcattttcgtgatgatgctatatcagttgatactccgcctattgaaagggttgctatttttgatgaggcacaaagagcttgggaccagcctaatctaactgattttatgaaaaggaaaaagggagtattagattttaatatgtcagagcctgaattcttaattagtatattaaatcgtcacagtggatgggctaccatagtttgcttaattggtggaggtcaagaaatcaacaagggtgaatcagcaggaatttctggctggtttgaatcgctaagaaataagtatcctgattgggatgtgtatatatctaataaaattacagatgaagaatattcaaaaggaaatacttttgatgaattagctgaaggtatcaattataaaattgtagaggatttgcatttatctgtatcacttcgttcatttagaagcgaaaatgtagctgcatttgttaaagctgttctagatgttgataaagataaggcaaaagagctatatacacattttaataaggattatccaatctgcattacaagagatttggaagctgctaaaaagtgggtgcgagaaaaagcaaatggctcacagcgctacggtatgactgcaagctctggtgctaaaagacttcgcaaatatggtgtttgggtacaaaataaggtagatgcaccgaattggtttcttaatggaaaggatgatgtaagatcatcttatttcttagaagaaacagctacagaatttgatattcagggattagagcttgactggacaattgtttgttgggacgcaaacttgaggttttacaataaccactttggcttttataattttaacggtactaaatggcaaaatatcaacaaggaagataatattctttatttgaaaaatgcgtatagggtacttttaactcgtgcacgacaaggctttgttatttttgttccaacaggtgatgaaaatgatgtaactatgcagcctgagttttataacgggatttataattatttaaaggatattggtatagaagaatttaagatatctaggtgagtcaagagattttatttgaaaatatacagagacagattattgataaaataaggaatgctaaataaatcatatggatagctatggtgtggttcacagaacctgtattatataccgagctgataaaaagaaaagacagagcgtgattatagaaatacttaaagaaaatgaacaaaaaagttcactcagctgaaaaaagtcacaattcagaagctattaatgcggaaaaagtcatgatgaagtagaaattttacatttcaatttgatagagtatcaaaaaccgaataaatgaattgtggtaagtgttctcaaaaatgtatagataaataattatagaaaaatattaaaacgtgatttaaatcaaagatgtattttcttattaataatataattaatccataagatagaacttgaggaggaataagaatgaatacatttaatagtaatcaaaaaattggagagatagtaactaagtttccaaatgctgcagatatatttaaagaatataaaattgacttttgttgtggtggagatagaccgttaattacagcaattaatgagcaaggagttaatgaagcagaaatactagaaaaaataaatgcttcatatgaaaaattacaaaataagctttacacaaataataaaaattgggtagaagcaccttttgatgaattagttgatcatattgtaaatgtccatcatggatatctttatgagaatcttcctaaaataagtgaattaacaactaaaatattgagagtacatggaggaaatcattctgaactttcaaaagtacacaagttatttcatactgtaaaaatggaattggaagctcatttaatagaagaagaaacaattcaatatccagcaattaaggagtatttaagaagcaacagtgaagtggatttagataaggcaataaatataatcaatcaattgcaagacgagcacactggagcaggtgatatacttaaagaattaagaaaagtgactaatgattataaagctccatcagatggatgcaatacttataaattaacttatgctaaacttgaagaaatggaatcagatatatttcagcatatacatttagaaaacaatatactttttccaagactttctgaattgaagaaataggatatctattacgtttatacttaataaagtagaaaaacttattaattagaaatattaactgcttaaattacaaaattgagcagttaatattttttcgtgagtaaaatcacattaattaaagtgattttattatactatgcataataaatgtaaaaatttataagcttttaatacataacttggacttatgcaataatccaccgaaagtagaaacattgttatttcacagaactatgaaaatttcgctgaaagttttaaattgtaggttgcactactaatgcttgctcccaatttcattgtgacaagcattagttgaacaacctacaattaagagcttttaacagctcattttcaatgcctgctgcataaaaatgtttctactttctagtatgttatttattgcaaaatataaatgaaattcttaagttgtttatctatacaagaaggctttaaatgtttaatgctgaattatttagcgatttaataaaaaatgcacaaggagatatcttagtctcaattcgaagaatataaaatgatttatgatacaacagacgaaaaaataaaagggttaaatgaagaaactaaggatattaatgttttttctaaagcatcaacttatgttatgatcaatttaaatacattagttaataagacttcatctcatatttcagagatgatgattaaaggtagtgtcatggggattatagatataacaaaaaggataaaggaatatcctaatgcagataaagaaatacttgatttagctaataaactattaaaactagagcaaaataatgttgaataatgcaagaaatattttcaataaaagactgtatgcaacatatagttaatttacagtctagtccattatattaagtcgcgatagattaagaataagtagaaaatttagcataaaaaattaaaatgctgatgtgcctatgctttctggtaatctactctctgaggaagcaattgaaagtttgattgaaaagttatcatatgaaattcgcgtagcgaaaattataaatggaaggtaattaatagaagaggatatatatcacatgataaaatttactgatgagtaattctcatcagtattatttttttactcataatatgacattgagtaatgtagcaaaatgataaaagtgtataaactataaatttgtagttgtttcactaaagtggtataaatttataaaaagaaagaagacattataatgttaagtttagttgacaaaattccaattttaattggtagaaaacaattttttataaaaaatttaaattagaaaaaataaaacgaagtaatgtattcttgatatagtaatatttttaaaaatatgatattctatactaatgcctaattttaaagtttggctatttttaaaggagatggtctatatgataccaataaatcataaaaaatttatagatagctcaataaaaattttaaaggatgattttagaattgtaggaattgcaacaggaggatcatatattacaaatgaaatggacgaatattcagatattgattttataattgcagtagattctaaccattatgaagaagtaatggatgagcggtataaaatagcagccaatctaggtacattgctatcagcgtttacaggagaacacgttggagaaccacgacttttgatatgtttatatggtccagaattactacatgttgatttaaaattcgtatcaatagataatatagcacatagagttgaagaccctgttattttatgggaaagaggtgattttgtatcagaagcattaaaggaaaataatgcaagatttccaattccaagtttacaatggatagaggatagattttgggtttggatccattatggagctacaaaaataggtagaggtgaaatttttgagactatagaatttatatcatcattaaggcaaatggtaataggcccactaatattgatgaaaaatggagagctgccaaggggcgttagaaaaatagaatttgttgctccagagagcataagcttattgaaagaaactataccatcatatagtattgaaagttgcataaaatcgctaaagatgataatacaaatatatttggaattaagagaatactttataacagaagattttataaaacgtgtgcaagctgaaaatcattctataaattatttaaataaaataaatcatgtatcagatagctagatatacattagttgattatgaatcaataattaaagagcttgcaaatgatggcgttaatggatttgtttataatatagatacttaaaaaaatgcaaaaggtgttgcagtgttaagttttgttcaagggaaaagtggtaagataaatgagtcatatgtaacatcaaaagctaacgtttgggaagtatttgatgcaggtattgcatgtcaaacattttgtttagcagcacatgcaaaaggtgttggcacatgtataatggggggtatagatgaaaaatcaatatcaaaaatagtaaatttaccagaagaagaaacagtagctgcgcttatagtttatggctatgaagatggagaacatgcatcgcaaactccaagaaaagatgctgaagaaataatgcgctttgtagatagataatgttaaatcatattatgtaataaaaaatataaagagcatgctgaaatatcacattattcataaagaaagtgtggtgttttttttatgtgcattctaaaatattatgccttatagagtatatgggtatttaccaattatgttataatttgtgccacaattctttggattaatgataataatgaaaattatttaataaattttaatattcataaaacattacaatctttatataatctttatacaaatataagcattttaatccaatctttataccttaaatagtattatttatataagattgaattctgacaagatgaaaacaatgttagattttatgcttatacacttactggtcttgggattttttcccgttatatcattatttctaggagtaaggaggatacaatgaaaaaaatagtttctatacttttattttttgcaattattagtattgttacgatgggggggagtagtaatccttatagtggcaaatacataacttcaaataatactattttagaacttaattcaactggaaaatgcaaggttataaataatttttataaagatgtattttacacctatggtcaatatacaataagcgataatgaaatagaaataatttttgataaagataaacgaaattatttaaatgttgaaagtttaaaagggaaagttaaaggaagtaatatagtattttatgattatatacaagaaggaaaagaatgcgtatattcaaaaatagaataatactagctttattttatatatatctatataattttgtaggtataaggtaaaattaagtgaaagttaggagtgatttaaatagatattgataaaaaacaaaatccagattatcttttaaatcaaataaaggaagaagaaaaagggtcttcaagaggaaaattcaagatattttttgggtatgcagctggcgtcggaaaaagttatgctatgcttatggaagctcatgatatgaaaaaattagggcacgacatagtaattggatatattgaaccttatgcaaggcaagaaactatggcattagtgaatggtcttgagaatttagataataaaatagttgaatataaaggaataaacttaaaggaatttgatttagataaagcgcttattagaaaacctgaaataattttagttgatgagttggcacatactaatgtaatcactcaaagacatagaaaaagatggcaggatatagaagaacttttagaagcagggatagatgtttatactactttaaatgttcagcatattgagagtttaaatgatattgttgaaagtataactcatatttctgtgagagaaacaattccagataaaatatttgatgaagctaataaggtagagctaattgatattgaacctgatgaacttcttaaaagatttagtgatggaaaagtatatagtaagggacaggctaggaatgatgtaaataacttttttactaagaataatttatatgctcttagagaaattgctttaagaagaacggcagatagagtgaattatgaagttgaaagcgtacgattatcaaaaggacagataactgtaatgccaacatcagatgcaatacttgcatgtatttcgccatcaccatcatcctcaagagtaataagaacagctacaagaatggcagaggcacaccattctaaatggatagcattttatgttgaaactacaaagtcacaaaatttaagtaaggaagatagaaaaagattaagtgaacactttaatttagcagagcagttagggggagaagtaataactgtttatagtgacaatatagttgaacaaataattgaatatgctaaatttagaaatgttactaaaatcattgtaggtaaaaatcgcaaaaagccaaatgtattttttcgtttttatgcaagagatatagttgataaaattatggaatccaattcgtatatagatgtatatgttataccaaattcaacagcaattaaaagaaatgaaaatcatataaaaaagaataagaccaaatttattatatcgttcaaagaaattttaatatcaagcctaataatgttaatttctgcgttggctacattatttattgataagttaggctatggcgaagctaatgttattatgatttttattttaggagttattattgtaaatattaaaaccagagggtatattttaggatttatatgttctacaattagcgtgattttatttaattatctgtttacaaaacctagatattcattacaattttatgataaaagctatttggttacatttccgataatgctgatagtagcttttacaataggtacacttacaaataagataagaagagaagcagaaaattctttagcaagagaaaatacaactcaaattttatatagagtaagcagaaaattattaagtgcaacaggcacatcagatgttatagggataggtataaaatacttatctaggttactagaaagaacagttatctgctacttggcacaagaaaataaactatcaactccatttatttatacagtaattaaagggggaaaagatagaagtttattaaataaggatgaagaagctgctgcgtattggacatttgtaaatgataaagaatctggtgcaggtactaacactttttatggagcaaaaggatattatattcctttaaaaagtcatgggaaaatattaggagtactcggaatttcatgtattaacgggaccttaaaacctaaacaaaaatttatatttgaaacagttgctagtcaaatttacatagcattagatagagaaattcttgcagaaactcaaaagaagtctaatttagaaattgaaagtgaaagactaagaagcaacctattaagatcaatttcacatgatttgagaagtcctcttgcaggtattaaaggtgctgtaagcactattattgagacaggtaatcttatatcagaagaaactaaaggagagctccttcaaggtatttatgatgacactgagtggcttataagattagtagaaaacttgcttagtatgacgagatttgatggtggaaatctgaaagttagaaaaagcattgaaattgtagaggaagtagtatatgaggcagttcaaaggactgctaaacgctttagggattataaaatggaagtaacagttccagaagaggtaataatggttcctatggatggaagcctaattgaacaagtgcttataaatctctttgataatgccgtaaaatttactcctaaaggttcgttaattgaggttaaaatttatgaaaataataaaaatgttatttttgaagtaattgataatggaatgggaatatcagaagaaatattacctcacatatttgaaagattttttacaaatggggataaaatatctgattcaagaagaggtgtggggcttggcctagcaatctgtaaatccattgttgaggcacatggtggaacaatcagtgcacataacaaagatgaaggcggagctgttttcagatttaatattccaaaggaggagatgtcagatggacaataaaccatatattcttgttgtagaagatgacaggcctataagaaattttatagcagcatctttaaagacacaaggatttaattatatagaaacagataagggggtggaggctgttgcacttactatgtcgcataaacctgatttgataatattggatttaggactgccggacatagatggagtagatgttataacgagagtgagagaatggtctaaagttcctataataattgtttcagcaagggaaaatgaaaggcaaaaaatagaggctttagataaaggggcagatgattatttaacaaagccttttgggattggtgaactgctagcaaggattagagtgtctttaagacatagcagagcaatcactaatgaaaaggagaatgcagaaatttttaaagtcaaagggttaactgttgattttagtaagagaaaagtgaccatagataatgaagatattcatttaactccaatagaatataagataatggctcttctttgtaaatatgcagggaaagtgctgacacataattttattattaatgaaatttggggagcagcagtgggaaatgaaactcaatctcttagagtttttatggcaagcctaagaagaaaaattgaaaagaatccagcagagcctaagtatatttatactgaagttggagtgggatataggttagcagacgattaactttttagatatttgctgtattctataattttcaataattttactaatattttcaacaattatattataagtattatatttagaacaagacataatatatttatatttattgcaaaggatgattaatatgaaatcaactataaaacataatgatgtcagtaaattaagtctaggaggaatcttagttgcgttaggcgtagtttatggagatattggaacttcacctctttatgtaatgaaatcaattgttcaaggtaatggtggtttggaaaatatatctgaaaattttattcttggatctttatcattaattttttggacgataactattttaacaacaataaaatatgtttttgttacattaaaggcggataataaaggtgaggggggaattttctctctttttactctggttcgtaatcgtgcaaagtggcttattattccagccatggttggtggttcggccttacttgctgatgggatgttgacccctgttgtatctgtaacttcggcggttgaaggattagagcttattccaagttttaacgctctttttggcagtaatcaagatattattattatcattgtaatagtaatattaagtatacttttttttattcaacattttggaactgatttaatcggaaaaatgtttggaccagtaatgcttgcgtggttttcgatgttggcaattttaggaattatgcaaatttctcatgattggacactattacgtgcattgtctccacactatgcaataaagattcttcttagcaatgaaaataaattaggattctttattctgggcagcgtatttttagcaaccacaggtgcggaagcattgtattcggaccttgggcatgctggaaggaaaaatatttatgcatcttggccttttgttaaaatctgcttattattaaattattttggtcaaggagcttgggttttatctgctagaagaaacccaatgtatacaaatgtagaaggcttaaatccattttttcaaatggtcccacatagctttttgatttgtagtataataatttcaactttggctacaattattgcttctcaagcattaatttcaggatcgtttactcttgtttctgaagcgattaaattaaatttatttcctagattacatataatgtatccatctagatataaaggacaattgtatatcccttcaattaataaacttttatggattgtttgtattggacttattctacactttagaagttctgaaaatatggaaggtgcctatggattatcaattactgtcactatgctgatgacaactattctactatttaactatttattaaaacaaaagatttcatctgccattgccattagtatgttagttttctttggtacatttgaagtttctttctttattgcaaatgctgttaagtttatgcatggtgggtatgtagcagttttaattgctttaacgttcttatctgttatgtatatatggattcaaggtcactatactaaaattcgcttattacagtatgtaaaaattgaagattataaagcacagctaaatcttttacgaaaagatactgatagacctaaatacgcaacaaatcttgtatatttaactaattcagagtatgcagagaaaattgaaagaaatataatgtactctatcttagataaaagacctaagaaagcagatgtgtattggtttgttaatattgttgttactgataatccttatgatgcggaatatgaagtggaaacctttggaacattttatatagtaaaagttcaattaaggcttggttttagaatggaacagaggttaaatatgtatttacgtcagatttctactgaattggttaaaagtggagaaataaatattcaatctagaaactatactattatgcccgatagaaaagttggcgattttcgtttctctttaattgtagaacagctttcatatgaaacagaattgaatttttgggaatccttcatatacagagctaagttgtttataaaaagatttactgtttctccaacaaaatggtttggacttgatactagtgatgttgatattgaaaatgtcccgctctttttaggcagctgtaataaggaaacattaaaaagagtttcaaaataactttatcaatttcaacaattaagattcaggtgtggtttgatctccagctgaatcttagttgaacttatatcctcaaggggtacctcgtcaaggattgtgctgttatctctcacttaaagaagtggaagtgttacagtttaatgtataaatattaggattacttcaagtaaataacaaataatatttttaaaattaaaggcaataaacatcatgaagtgcaccccaaatgttagacatatgatataatcatatttaatatttggaggtgcattttttcatgtggaggaaatattcagtagaatttaaaatggaagtaatagaagtatggaaagaacataaacttacaatggctgagattatgagtaaatataaaatttcagatcaaaccgtacaaagatgggttaaagaatacgactgtcaaggaatagatggattagtaacaaaaataacaaagatgaattacactggtgaatttaaacaaaaagttgtcgaagatatgaaagaaaacggactaaaccaatcagaaacagcacgtaaatattcggttggaagaactcaagtgcaacaatgggaacgtatttaccttgagaaaggaccagaagcactatataccgaaaatcgtggtagagctcctaaatcagttaattcagaaaaggatattaaccttaacaaaagtactgaaactgatttaattgctgaaattcgacgtcttcgcatggaaaatgactacttaaaaaaattgaatgccttaattcaaacaaagggaaaataaacgacaaagataaggctactgttatcttagaattaaggcataaatataaggtcgttgaacttattcgcgttgctggcattgccaggagcacgtattattactatcttaaatcatctaaaacacctgataaatatgcagaggctaaagaagcaattaaacaaatatatcatgagaataaaggtagatatggttatcggagaattaccatcgaactacataatagaggctttgatttaaatcataaaacagttcaacgtttaatgaagcagctagatttaaagtgtatggttcgagtaaaaaaatataaatcatatcgcggaggcgttggcaaaacagccccaaatatattgaaacgtaactttaaagctgagaaaccaaatgaaaaatgggttactgacgttacggagttttctttgtttggtacaaaactctacctatctccaattcttgacctatataatagagaaatagtcagttataatatatcagacagacctaattttgctcaaataacagatatgcttgaaaaagcatttttaaagattcctgacgatagtaaacttgtgtttcattcggatcaaggttggcaatataaaatgaaactctatcaaacaatgttaaaaaagaaaggaatagttcaaagtatgtctcgtaaaggaaactgttatgataactctgtgatggaaaatttctttggattgttaaagtcggagttattctattttcaaccgtttgactctttagaacactttaaagcagaacttgaagaatatattgattactataataatagaagaattaagaacaaactaaaaggactgagtcctgttcaatacagaattcaatccttcatgatagcttagttaaatttgtctaactttttggggtcagatcatcatcaagtgtttattgcctttttttagttattttatgagaatcgtcaccagttaaaggagcttcactagaaaaaccacacacttcaccttcatcatattcaaaatcatttttaggaacctttgcggctctttttccagccataaattataaatccttttttggcagtttattagaagtatttttatgtttattcttaaaagatatatggctatttattagagattctattagaaatattaatgactaaaggcttaaactcctcagccaatttatcttttgataagatatctccatttttacatatgtatattgttaagacatgtaaaaaaaatagacataaatccaattgatatattaagggacttaattgcgacaacagcaatatataaggtttcataaaaaagaagtgattggcatgcttattgctaataataaaagtaacacttgaaaataaataaatttatcaaggagggaatttatggataaaacggaacacttattgagacactttgaagaaaataaacagtataagcagcaaattaaaaaattaaagaataaaatatttttagcaaaaatacttaagtatgcactaagattaagcaattttctttatgtagtaccaatcattctcattctctttatatttagaaataatagattgattggcgcatttatttcaatagcatatttttatacaatatgtatgctgttaaagttagatgaaaacagtagaattatgaggtttttaaatgaatattcggattcagattgtgatattaagatatatgaacaagaattaaaaataaagaacaacgagttgtatactaaatctcgttaagaaagtaggaaattaactcttcaaaaaattaggaaactcaatttagaagaagtcattctaagaaatataattaaaggtgtacaaaatatagacataaataaaattgatatatttaggaattgattacgaaaaccacaatatataaggtttcatggaaaaaatatgattggcatgcttattgctaataataaaattaacgggagtagtaagtgaactaatatatataacttaatttttccacaatctttagtgcaatgctatttgctatttaaggataggatatcttttttaaaaatttttgtaaacaatttcgtattcgaatatgcatagtgaaatatgttttcattaatagataaggtggtagatacttaaaaattaaatttaaaaaataaataaccaaatttgagggaggtcattaaaatggaactaaaaaatgtgattcttgaaaaagaaggacatctagctattgttacaatcaatagacccaaggcactaaatgcattaaattcagaaacattaaaggatttagatgctgttttagaagatttagaaaaagacagcaatatgtatacagttatcgttactggtgctggtgaaaaatcttttgttgctggggcggatatttcagaaatgaaagatcttaatgaggaacaaggtaaagaatttggaattttaggaaacaatgttttcagaagattagaaagattggataagccagttattgcagctatatcaggatttgctcttggtggtggatgtgaacttgctatgtcttgtgacataagaatagcttcagtaaaagctaaatttggtcaaccagaagcaggacttggaataactccaggatttggtggaactcaaagattagcaagaatagttggaccagggaaagctaaagaattaatttatacttgtgaccttataaatgcagaagaagcttatagaataggtttagttaataaagtagttgaattagaaaaattgatggaagaagcaaaagcaatggctaacaagattgcagctaatgccccaaaagcagttgcatattgtaaagatgctatagacagaggaatgcaagttgatatagatgcagctatattaatagaagcagaagactttggaaagtgctttgcaacagaagatcaaacagaaggaatgactgcgttcttagaaagaagagcagaaaagaattttcaaaataaataatttagttaaaaatctattagagatttttatatagtttatatcaaataggtttaattaacaaggagggtaatttaatgaattttaagttaactagagaacaacaattagtacaacaaatggttagagaattcgcagtaaatgaagttaagccaatagctgccgaaatcgacgaaacagaaagattccctatggaaaacgttgaaaaaatggctaagcttaaaatgatggggatcccattttttaaagaatttggtggagcaggcggagatgttctttcatatataattgctgtggaagaattatcaaaagtttgtggtactacaggagttattctttcagcgcatacatcattatgtgcatcagtaattaatgaaaatggaactaacgaacaaagagcaaaatatttacctgatctttgcagcggtaaaaagatcggtgctttcggattaacagaaccaggtgctggtacagatgctgcaggacaacaaacaactgctgtattagaaggggaccattatgtattaaatggttcaaaaatcttcataacaaatggtggagttgctgaaactttcataatatttgctatgacagataagagtcaaggaacaaaaggaatttctgcattcatagtagaaaagttattcccaggattctcaataggaaaattagaaaacaagatgggaatcagagcatcttcaactactgagttagttatggaaaactgcatagtaccaaaagaaaacctacttagcaaagaaggtaagggatttggtatagcaatgaaaactcttgatggaggaagaattggtatagctgctcaagctttaggtattgcagaaggagcttttgaagaagctgttaactatatgaaagaaagaaaacaatttggtaaaccattatcagcattccaaggattacaatggtatatagctgaaatggatgttaaaatccaagctgctaaatacttagtatacctagctgcaacaaagaagcaagctggtgagccttactcagtggatgctgcaagagctaaattatttgctgcagatgttgcaatggaagttacaactaaggcagttcaaatctttggtggatatggttacactaaagaatacccagtagaaagaatgatgagagatgctaaaatatgcgaaatctacgaaggaacttcagaagttcaaaagatggttatcgcaggaagcattttaagataggaggacttttagaatgaatatagtagtttgtgtaaaacaagttccagatactacagcagtaaaaattgatcctaaaactggtacattaataagagatggtgttccatcaataatgaatccagaggataaacacgctttagaaggtgcattacaattaaaagaaaaagttggaggaaaagttactgtaataagtatgggacttccaatggctaaagcagtattaagagaagcattatgtatgggagctgatgaagctgtcctattaacagatagagcacttggaggagcagatactttagcaacttcaaaggcacttgcaggagtaatagctaagttagattatgatttggtatttgctggaagacaagcaattgatggagatactgcacaagtaggaccagaaatagcagaacatttaaacattccgcaagtaacttacgttcaagacgttaaagttgaaggaaatacattaatagtaaatagagcactagaagatggacatcaagtagtagaagttaaaactccatgtctattaactgcaatcgaagaattaaatgaaactagatatatgaatgttgtagatatattcgaaacttcagatgatgaaatcaaagttatgagcgcagctgatatagatgtagatgtagctgaattagggcttaaaggctcacctacaaaggttaagaagtcaatgactaaggaagttaaaggtgcaggagaaatcgtaagagaagcacctaaaaatgcagcatactatgttgtaggaaaattaaaagaaaaacactacatctaagataataggagggtaatttattatgaatatagcagattacaaaggcgtttgggtctttgctgaacaaagagaaggcgaattacaaaaagtatctttagaactacttggtgaaggtagaagaattgctgatgaattaggagtaaatcttacagctttattattaggtagcaacatagaaggattagcaaaaactttagcagagcacggtgcagatgaagttttagttgctgatgataaaaacttagaacactatacaactgatgcttacacaaaagttatttgtgatttagcaaatgaaagaaaaccaggaatattattcgtaggagctactttcatcggaagagatttaggtccaagaatagctgctagattatcaacaggattaacagcagactgtacatcaattgacgttgatgttacaaatggcgatcttttagctacaagaccagcatttggtggtaacctaatggctacaattgcttgtccagaacatagaccacaaatggcaacagtaagaccaggagtgtttgcaaagattacaactgatccatctaaatgtaaaattgaaaaagttgatgttaaattagaagatagcgatgtaagaactaaagttttagaaactataaaagctaagaaagatatcgttgatatagctgaagcagatttcatcgtatcaggtggtagaggagttggaaacaaagaaaacttccaattacttaaagaattagcagaagctctaggcggaactgtagctggatcaagagcagctgtagaaaaaggatggattgatggagcatatcaagtaggtcaaactggtaagactgttagacctcaaatatatatagcttgtggtatttctggagctatccaacacgttgctggtatgcaagattcagatttaatcattgctgtaaataaagatgattcagctccaataatgaaaattgctgactatgcaatagttggtgatcttactaaagtagtaccagaattaatagctcaagttaaagaaataaagagcgctgaataatataatttactaattaaaatgatttaatccgtagttagaatgtatagattaaaataataggaggttaaaataatgcaaggattaagtattgataagataaaagtaggagacaaaacttcagtcgtaaagactattggtgaatcagatgtatatttatttgctggaattactggagatttaaatccagcacatacaaatcaagttacagcaaaagaaacaatatttaaagggagaattgcacatggtatattagtatcaggtcttatttcgacatgttttggtatgcagcttccaggaccaggtacaatttatttatcacaaaaccttaaatttactgcaccagttcactttggagatacaataacagcagaaatagaggctatagaagtgattgaagatagaaatagagtaaagttcaagacagtatgtactaatcaggacggaaaagtagttattgacggcgaagcaatggttatgccacctaaaaaaacagtataaatgattaaagaactgaataaatagaatataataacaaaagtcttttgcattagtttgctaaaagacttttgttattgtatatatatcaaaatttgacgattctttataatttttcttaagtgtagtataataatattcaaatataagatatatttggattttcatttcttttaaaaacacaaataaacactagttgaaaatttctttgaaaacgtataaaaaattattgttataaatcaataaagagagatttatgactgtttaattgctgttaatgaaatgaattattacaaaatataattaaatagggaggtaattatgtttttagaagaatgttttgaactaataattcaaaatgtaaatgaagctttaatagtgattgataaaaaaggaattatattagttataaataaaaaggcagaagacatgtttggaattagttcagagagaaatcttggtaaatatataggtgaggtgttacctgaaatacaaataccaaaaatcacaaaagcaggaaaagctgaattatctcagatgatttttattaatggaaaagaaattatttcaaatagaattcctataattaaagatgaaatggtagaaggttcaatagaaatatttactgatattacagatcaaaaaaaaatgcagaataagataaacctagataaggattatattgatgcgctacttactgtaatggatgcctttaatgaatggtttgtagtaataaatgaaaaaggtataattaccagtatcagtgatgattataaagaatttttaggttgcgataatcctataggaaaaaaagtagaggatataatagaaaatacaaagatggggaaggtcttaaaaacagggattgcagatataggtgggattcaggaaataaaaggtaataagatgattgctatgcgtgtgcctataaaaaaagatggaaaggttataagtgctgtaggtaaagtagtatttaaagatatcagcgattttcatgctctaagtaaaaagttgctcgacttagaaaaagaggttgaattttacaaaagcaaaattgctgaaaataaaacggcgaagtattctgtagaaaatattattggacattctaataaaataagaaaagtaaaagatttaataggaaaagttgcaaatacaaattcaaatgttttaataaacggtgaaagtggtacaggcaaagaaatgattgcccattctattcataatagcagtaaaagatacttagctccatttataaagataaactgtgcctctattccagcagaattattagaatcagaattatttggttatgaagaaggagcttttactggagccaaaaaaggtggaaaaaaaggaaagtttgaactagcaaatggtgggtcaatatttttagatgagataggtgacatgaatataaacatgcaggctaaaattttgagggtaattcaggaaagggagattgagagtatcggaggcagcggagtaaaaagcgttgatgttagaataattactgcgacaaataaaaatcttgaggagcttgttaaaaagggggagtttagagaggatctgtattacaggctaaatgttgtgaaaattgtttcacctcctttaagagagcggaaggaagatattcctgcattggcaaatgcattgagaattaaaatagcaaaaagattagatgtatatgtagaggggatatctaaagatgctatagagtgtttaggcaactatgattggccaggtaacattagagaacttgaaaatgttattgaaagagcaattaatttgttggattctaatataatgataaaaacagaacatttgtctaaaagatttacaagcgctaaatacaaaagatatagtgataaaaatgaatacttgaaaaccatagttgaagaggttgaaaaggaagttattctagaatgtttaaatagaaataattggaataaaaataaaacagctcaaatattaggaataagtagggcggggctatataagaaaatagaagaatttaatttaaaagtataattaagtaggagttttaaaaagttcctacttaattgttttttaccctattttattgaatacttatgcaattagtattcaataaaatagggtacataatattagtttaaacattgatataaattttgagaataacctatttataagcttttattaattcataaaaaaatatgtataaaaaaaatacatgtaaaggaaataaacattaacaaagattatataatattaatcttatgggggaaaatctttaaaagtgtacaaaaaaaacacatatttttctgatttattttatttaaaaaggtaaatagaattaatagtaaacagtttaaaaaaataatatttaaagagtttagtagatttggaaaaggttttcgacttttggaaagaaacttggcatcctaattgctctataaaaaggtatgaggagggattatgaatgaaatctaaatctaaagttatgtcaaaagagcaagctgtcgctttaataaaaaatggagatactattgcagtaggtggatttgttggctgtgctcatccagaagaaattacagcagaaatcgaaaaatcattcttgagtaaacagttacctagagatttgacattaatatatgcagcaggtcaaggtgacgggaaggataagggtttaaatcatcttggttatgaagggctgcttaaaagaataataggtggacactggaatttaacaccaaagcttcaaaaactggctatggaaaataaggtagaagcatacaatttaccgcagggaacaatatcacagatgtacagagatattgctgctggaaaaccagggacattaactcatgttggattgaaaacctttgtagatcctagaatagaaggtgcaaagcttaataaacttacaacagaaaacatcataagtttaatcaacatagatgataaggaatatttgatttataaaacttttcctataaatgttaccattttaaaagctacatacgcagatgaggatggatatgcaacaatggaaaaggaagcactaacacttgatgcaactgcaatggctcaagcagctaaaaattccggtggaatagtaattcttcaggttgaaaagatagttgctaaaggctcacttgatccaagaaaagtaaaaattccaggaatatatgttgatgcagtagttgttgggtctcctgaaaataacatgcaaacttttggtgaagcatttaacccagcatattccggagatgctagagtaccagtagattcaatagaaccattagagattaatgaaagaaaagtaatagcaagaagatgtgctatggaacttgtacctgatgctgcaacaaatctaggaattggtatgccggaaggaatagctatagttgctagtgaagaaggtattggagataaaatgactctaactgtagagccaggaggaataggcggagtacctgcaggtggtttaaacttcggagctacaactaatccattatgtataatggaccaagctactcagtttgatttttatgatggcggtggccttgatgtagcttttttgggattggcacaatgtgataaggtgggtaacataaatgttagtaaatttggtcctaagattgcaggctgtggtggatttataaacataactcaaaattctaaaaaagttatatactgcggcacatttacaacagggggactgaaactaaaaatagatgaaggtaagttaataatactaagtgaaggtaaggttgataagttcgtaaataaagttgaacaaattactttcagtggtgaatatgcatcaaatattggacagcctgtactttatgttacagaaagagcagtatttagattatctaaatatggcttagttctaatagagatagcaccaggagtagatttggagaatgatgtattggctcatatggaatttaaaccaataatatcaccagatttaaaacttatggatgaaagtatattcaaggcagaaccgatgggattaaaaatttaaatattaagttagtattttatggactgatagataaaattagctatagggttctgcaatgagaattaaacaaaaggatatcattgatttctagttagtgaatatattcacaatataaatttaattatccattaggaaccctatatgaacatataggaataaagaaaatatatatatggaggtattataatatggcggttttaggaattttcttagcattaggactactaatttttttagcgtataagggcttctcagttgtagttatggctccagtgtgcgcactagtagctgttttattatctggaatgtctattttaccaagttacacagaaatattcttacctaatttagcaaactatctaaaagtttatttcccattcttcttattgggagctatattcggtaaagcaatggaggaatccggcgcagcaaaagctattgctaaagcaatagtaaacaaattaggtaaggagagagcaattttagcagttgttttatcttgtgcaattcttacttacggtggcataagtcttttcgttgttgcttttgctgtatatccatttgctgcttctgttttcaaagaagcagatataccaaagagacttctcccagtaactattgcattaggagcattcacatttactatggatgcttttccgggaacaccacaaatacaaaactcaataccaatgaagttctataacacagacctttatgcggctccagttgtaggtatcatagcaacaattataattttatgtggaggtttggcttatatagagtggcgtaaacgtacagctcaggcaaagggagaaggatatggtacagggcataaaaacgaacctgaatttgatgaaaatgaagctttaccaagctttggtatgtcactattaccgttggtatctgtgcttatagttactttagttcttcaaaaagtagtttttccaaattggaatatcgcatcttgggcaactcaagcgccatataatatggctgaaggcggaattacaggaacaatgaataactgggcacttattatcgggcttcttgttggtagtatacttgcatgtttatcaaatccaaaaactatgaaagttactatacctaaagctatcaacttaggtgcggttggttcattcttagctatacttaacacatcttcagaagttggttttggtaatgttatcaaatcacttccagcatttaaatctatagctaatgctttaataggaattaattctaatggtagcccgcttctttctgaagcagttgctgtaaatgttctttcagggacaactggttcagcatcaggcggtatgagtatagttcttgacatgttcggtgaaaaatatatggcatgggcggcagctacaggtacaagtcctgaattacttcaccgtgtagcttcaatggcttcaggcggtatggatacattacctcacaatggagctgttattacacttttagcaattacagggttaactcataagcaagcatacagagatattttctttataactgtattaaaaacaggaacatgtttcataatgatattccttcaaagtttcttacactttgtataaaaattgaaagcagagaggattacgaatattgtaaactttatttttaagttttcataagatcaatataaagagataattataaggatggcgttacaataacaagcataagagtagaggcttaataataaatagttctatagagtagtgtgaaatctactcttttttattgtctaggaatttatattcaaattaaatatgtggataagttatggaaaagacagattaagaaagttatgatttgtaaagagaataaaaaggaaattatattcgcctgcaaaattttcctcatatttgttcaaaaaggcggatgcgtaaaaaaatctacacctatgaaaagagtgcggagcacaatacggaacttaaccaaagtcgcctgcgattttgttcttgtcaaatttatataggagtgttttattattctattagtatatagtgtgagaaaaaagtcatctctacattaagtacatggggtaaaaaatcatatatctccaacgtaggtgtataaaaatgaaaaattttatttacaagagcaaattaggataatgaaatagcaaaaactttaaatgtagaactacatgtcaaaagcagagtttgaaaaaatatgaataagaataagattctagaaaaatataatctagagatatatattaacactgagttaagtcaaaattataaagatttagaatctatacaaagatatattaaaaaaaatggagaagaaaatctggatttattttctgaaatgttttgggctgataaaagtgatagtatcagtaatttaaagaaagaattaaattggaaatattaaaatgcacaagatatcaaagtcaattgatggaggatatgcttacttatacaatattttgtggaaaatgttcacttttaatcaatttcagacataaatcctcatggagaacctgtagggggggcagttataaattcatgaccaacacctcagaggtccagaaaattttgtgataaattaaccctacataattgtgcaggaatagtcggatggataaatatgatttctgatattctattgatgaaaggaaggttactaaatggattcgataaaaaaaatgaatgaagcattaaattatattgaagaaaatcttgatggtgaaattgattttaaaaaagtagcaaggttagcattttgttcagaatatcattttcaaagaatgttttcttttcttgcaggagtttcactgtctgagtacattcgtagaagacgttttaccttagcagcttttgaacttaataatagcaatataagaataattgacttggccgttaagtatggataccagtcagcagattcatttacaagagcgtttcaaaatttgcacgggataacgccatcggaagctcgatataatggaaaatcattaaaatcatatccaagaatgacttttcgtttatcaattgaaggaggaaatgaaatgaactataaaattgaagagaaagaagcatttaatataattggtattaagaaaagagtacctataatttttaatggagtaaatcctgaaattgctaagatgtggcaaagcttaactgttgaaaatatcaatgaattgaaagaattatctaatacagaaccaaggggactaataagtgcatctttaaatttttcagaaggacgaatggaagaaaaaggagagcttgaccattatataggtgcagcgactaccaaagagtgtccagataacttatcaaaacttgaagttcctgcttcaacatgggcagtatttgaagctgtaggaccatttccagatacattgcaaaatatttggggacgcatctattctgaatggtttccatcttcaaactacgaacaaaaacaagggccagagatcttatggaatgagaataaagatgtaacttcactaacttttaaaagcgaaatatggataccggttataaaaaagtgctagtatagacaagtaaaaaaataaagaagaagcagaaatatcacattattcagaaatgaattttgtggtatttctttatacagcagatgtcaagaaaattaccattactcaaggaaatgtatcttgtggaatttaaggtgagaaatgaatataaaaatattaaatatacagtctggtaatatgttataacttgtaagccccacacacctatcaactcctataaatattattttttataacttgttaagcttttttaatttaggataaaaaattggaattttaaattaggacctctggggtaatagtagtgagtttaagaatgacttgatatctgatataaataacaatattaagaaagtaaaaaaaacaatattcagtatggttatcgaactgaatattgttttttaaaagagcataacaatcttaactagcacaataaaagatagtttattatcatataaaaatctttcgactaataatacaacaaatcacaacctaataatcatgttttgctccaccaaacaacatatttactcaactcaatataacctcacggctatataaaatcaattcaacacattgaataatgttaactcgaccttaaataataagttggagtaccattataatagatataaatcaactataataaaacttttccccattatataaaatcttatcgccgactaatataacagccataatattatgaccattatataatctttgttcgacctatatacaccctaactcaagagcatatataaatctttgctcaactgctatgttccttataatattaatatgtgcaattttagttatagtatacataaaatcaaattgtaatttatggaagtcaatgaaaactattttatagcaatatgtgagcactttttctttgattttaacttctatgtcaaaatcaaagaaagagaatatttttaattatttagtgcgataattctatagaacactatgagttatttgcgtacaatatcctattgtatttcagtatttataaagaaaactcgtatttcaactgaaatatagtataatgtttggtagaacaaaagaataactatatattttgtaattataaattcataattatttttgcaatatatatgaagaaagacagagagggaaaaatgaagattgcagttactactacaagagatgcagatgagagtctaaattataaagcaaaaggtgtatctaaggatttaaatatatcatatataaaaagaggtaattttagtatcaaagaaacaattttgaaagatggttttgactatttattaatagttgaaagagacaagattgttataaagggagaagatagtgcactgttttggcatcctaatatgtcagaacttaaggttaaatcaataagacaaggaaataaggaagccataatagaggcaacaaaattagaagaaggaaatagtatattggattgtacattaggtcttgcaggtgattctcttgtcttttcagcagttgttggagaaaagggatatgtagtagggacggaaattaataagtatatagcttatttaagtaaatgtggattagaaaactataatggtgttaatggtaaaaatatagataatataaaggttgttaatgaatcatatgaagactatattttaaagcaaagagataatagttttgatgtagtatattttgatcctatgtttaaagaaccaaatagaaagtcaacatcaataaattcctttagagcttttgcagatcataaagggttaacaaaagatattttagcggaagcacttagagtatgttcaaaaagagttgttattaaagaaagacaaggctctaatgattttgaaaagctaggaatagaaaaatattatggcggtaaaaaaagcggttcaattatttatggagtaattgaaaaaaatatataagaaatttagatgtgctaaggtaagaagttttatatgaaaggaggtttaaataataattagtttagtgtacaatgggataaatattaatcatagatgagaggaaattgaaatgaacggaacaaagagaagtaatattaaaataggagcaacggttttagttgttcaaaagcaagatcaacgtacaggaaaattgacagaaggaatagtggcgaagatacttaccaattcatcagagcatcatcgtggcataaaagtgatgcttgagagcggtattgtgggcagggtgaaagagataaagtaacagttattatataaatatttatcataaagataatgttttatatgacgatatggaagatttctgtgactcaagcattgaagctattgatctagagacagaggatttatcgataagtgacaccgtaacagttacttgggaaattatttaatagtatgtataaaggttagaagtaaaaattacttctaaccttttgatatttaacataaaaacctagaggaaaaatataggtgaattaataaaaaattgtagtataataatggtagaatatttaattgaaattacaattaagtcgaaatactaattatgtttataatgggaagtttaagatatttaatattttgagatgagttactaattttgaatgaaatacaaggagataacatgaataactataattttgcgacattaaatgatgaagagtttgaggaaatatgtaaagacttactgagagaagaacttggattggattttaggacatataaaaaaggtagagacaaaggtatagacttgagttatatcaatggtgagaagaagataattggacaggttaaacattatccaaagtcaaagtttagtgatttaaagagtacattaaaaaaagaactagaaaaagttagagaagaaaattttgaaaaatacatactcatcacatctttggatttaacagtaaaccaaatacaagaaataatgatagtaatgaatggtgtaataaaaagtgaagatgatatatatgatttaaaaaagattaatactatactacaaaagaaagaaaatgaatggatagaaaaaaagtattataagttgtggttatcaagtactacagtattaaatagaataataaataatgctcaagagaataatatcgaatactatatagatgaaattgaaaggaaacttaaattatatgtagtaactgaaaatttcaataaagcattagaaattttaaataaaaccaatatgttattaattcatggagaaccaggtgcgggaaaaacagttttagcagaaatgctaatttataggtatttagataaaggttataaattgaaatttatttctggaaataagataaaagatcttgaagaaataatgtctaataataaagaagagaaagaagtaatttttatagatgattttttgggttctaattttttagaaatgtttactcaaactagtgagaataagctagtattctttttaaaaaagtacttaaataaagagtgtaaaaaagtaatattaacaactagaactataatatataataaggcaattcaacaatcagaaatattaaaccggtttagtattgaatttgaaaagtataaattggaagttacatcatacaacatgattgataaagctaaaatattatataatcatttatattttaatgaaatacctaaaaaatacaaaaagaaaataaaagatgaaatggcatactcaaaaatagtaaaacatagaaattatacacctagaataattgagttttttactaatgttcgcagagtattacaaatagatccatctatgtacattaattttatatttaaaaatctaaataatccttcagaaatatggaaaaacgagttcgaaaataagatatctgatgaagaaagattcctaatatatacgctattcacatttcaaggaaatatagataaatatatattaagaaatgcatttgaagatagatataattatgagattaggaataataattttactagaattcaaaatgcatttgacaaatcattagaattattatcaaaaggctttattagagtaattagggggatgaatgagaaaaatataataatttcatttattaatccatcaataaatgattttttaatgaactatttgaaaaataatattgatgaaataaaaaggattgtatgtagtgtaacatacattgaacaattagaagtatttaagacgaacagtgtaataagacaaagtacttatgttaataatgaagtaaagaaattaataaaaaatagacttataggtggttttaaaaatattgaaacgtataaagttgataaaaatatttatattcttgagatgataattttattatataacaatgatagtactatgagagaatttataaaagatatattatatagctttattaaaaatgaaagtattggaagtaaacagaatctaaatttactaatagaattattagagaataaaaacatagttttatcagatatagaagatttatataaaaaagagggaataattcaaaaaggagaaaaaataattttaaataaaatacaacatattgagaattttgtgaaatatacaaaaatgattaagtcaatgatttcatatgaagatgtgctagcattatttaataaagaatatctagcgcatactgttgatagactttgtgaacaagcaataagcgacttttgtaatgaaatttcatttattaatgaatgtggatttgaaaataaaaataatgaactatattttgattataacgaagcggaaaatttattagaatgcaattttcaccgctataaggaaaatattttctttgattataaagaagaactttcttattttttattatatgaacgcatgaaaaatagtatggaaactttatttgatttatattataaagaaaatatacttgaagcgatggaagatatatggaatgaaatacataaggcaaatgtaacaaataaagtaattaaagtatatcaggaatataaaggtaaatcttcaagtgatagatacaattataagaaatatgaatcagaagaggagcaaatttttaatatgtttaatcgattatagtgcataaaatttataggattagtagtatatgtaattagtgaaattaatttaatattatattttatatatttgattcggagggaagtatattattagcaacttcagcccttccgacttcagaagcacccctgggggtatttgtgagggaagaatgactgaacttgttaaagaatagataattgcgaaactcattgataaaaatgaataatgattgatttgaagttgcaaaaacattattaatggatttaatggttcctgctatacaaatataatagttgacttcttaaaaaagggcgcacgaaataaagcgaaggtgaattccaatttttataaataaattttatgcaattaatggctttaagcttcggatatatttatgtttatgaattttatctgccacgataactgttattagttgagttattccggctagaagtaaatcagcatgaagtgtttgctcattttgagtcttacgctccgcgacgcagtaactatatttgaagtgatttatatttttttcaacagctactctgattttataagtattactccattcttgggttcctcgtgttattccaggatatgcgcgcagattcttttcaggataaatataaaacattcgtccacataaggaatttgtacatggattttcacattgagttacacgtttgctctttttggtttctttgttatataaccatttcattttagggcatacaaacttcattgttggaattctagaacgaagatgacttttactaccttcacgtttcattggaatagaaggatcattcggacagcatggaatgccgtcttcgtttaaagggcaatcagcattttctagtgtaagcctagtttttaaaggaatatatgctttatcaaattttaattcgagaagaagatcacgataaatttgaatactgtcaaaagcagcatctcctaaaaaggtttttggacttattaatggatgcttgttaaaaaaatctttgagaacagggataagagccttagaatctgcaagagatttatcttcatcaggtgaatcagattttttctcaacaataatatcaggatgagcattgagaaaatctttattatagaacgaaatatctcttacgataccgaggccattagtaatgattccgaatttaaaagcatagcaaaaatgcccattaatatacatttgttggatggcagggttggctgaagcgtgtgatggcatagagccataggcagctttataaggatcataagagtcatctaaattgcatgctttcttaaaatttttaagctgttttataatgcgattagcatatttaggattattttcagtgacaaatgcttcaaggcctgaagtatcaaaaatagtcatggaagcaagagccgtatcaatctgttggcatatcggttcagtaatatcaacaagattatcgaacatggattgtaagtccaaaagaaagtcctgcttgaaacgagtaaacttagatgaatcaggaactcttaaaaagccgcagaagtctcttagttcttgagaatatttaaggaaaataattaaaagagaatctgtaggaatagaaaaaatgcgttgtaaaattaaagcactgatcatagcataaagctgatattttcgcggccttcctgtggaagcgtaaaaatggttaatgaaagatgcaggaactaactcatcaaggtcgatagtgttttcgagtaaagaaagaaattggaatttatcattttcaaatttttctttgcaatcagaataaacatctgccaaagaaagctgtttatatgttatcatatatatgactcctttctgaggtatatggtagttttgtttttaggcaattcaattttaccataaatcagtgaggagttattttattttgctaaaaaaatatcccgcatttctgcgggttgcggcgtttcgcaaacgcctattgttaaagaaaatagaaaggaggatatttccattattagattgcagttgttttagttactttgtaggagactaaaataactgcaattcttgttttattacaatttagtcacttaaaaatcgtataggctgttataataatgttaaatctataagagaggtgatataacttgaagattttactagttgaagacgataaaattattgcatctggactagaatattccttgaagcaggaggggtttgatacaatggtttgttatgatatttcctcagctaagggtgttatagaagataataaatttaatctatgcttatttgacttatcgctgcccgatggaagtggatatgaactatgtaagctagttagagaaaaagatgatacacctgtcatatttctaactgcttgcgatgatgaagttaatgtagtaatgggacttgatattggtgcagatgattatataacaaagccttttcgtatcagagaacttatttctcgcataaggtctgtaatacgcagatatggtaaggacagcagttcaaaagcaatattagaattaaataatattcgtattaatactcttgatgcaaaggtatataaaaatgatgcagaaattaccttaacagcgcttgagtatcgtctattgctaatctttgcaaataatccggggcaggttttatcaaggaatcaaattttagagggaatatgggatgtagcaggagattttgtaaatgataatacgctaacggtttacataaaaaggataagagaaaagctggaagatgatccacaaaagcctacaattataaagacagtcaggggtttgggatataaggttggtgattaaaatgataagaaatagagaggttagagtgtactttattattgcttttatagtatctacgatagcagcagcatgcatttttttcttgaatgttctagcaggaataatttcttttatagcctttgttatcttgtttgttagtagtttttggtttattaaaagagaatatggagagcttgagaaactctctggttatttgaggcgtatttgcaatggagagtattcactggatattagagataatgaagagggagaactaagcattcttaaaaatgagatttataaggtaactcttatgctttcaaagcaaggggaacttcttaaaaaagagaaaatgcagcttgctgatgcaatatcagatatatcccatcagctgaagacaccgcttacatctatgagggttatgtcagacttattaagcaataatgacctagagtcggaaaaaagaattgaatttactaataatattgaaatgcagcttgatcgtatgcagtggctgttaacttctttactaaagctatctaaaatagatgctggaacggtgagctttaaaaaggatagagtagctgtatcagaactaattagaaaatcaactgagcctcttctgattcctatagaaattaagaatcaaacactagtgatagaaggcggtagtaatgtaagctttattggagatttatactggactacagaggctttaatcaacataataaaaaattgcatagagcatactggagaagatggaagaatatctatcttctttgatgaaaatcctttgtttacagaaataaagattttagataacggaagcggaatagaaaaagaagatttaccatatattttcaagcgattttataagggcaaaaatgcaggtgaagatagcgtgggaataggtcttgctatggctaaaaccattgttacaagtcaaaatggagatataaatgtaagcagcaggaaaaatgaggggacatgttttattataaaattttataagataacggtataaaggatagaaatttatatcaaacaaaatttaaggcttaaaaattcataagtgactaaattgtaataataaagtcactataaagtcatctgaactatatatactaaaaccatgataaaaaaacttggaggttttaagatggaaatactaagaatagaacacttatctaaggtatacggcgttggggatactgcggtaaaggcacttaatgatgtatcattttcagtagaaaaaggagaatttgtcgcaattattggaccatcaggttcaggaaaatcaactttgcttcatatgcttggaggggtagatagaccgactagtggtaaggttttagtagataatactgatatttataatttagatgaaacacagctggctatctttaggcgaagacaaatcggacttatatatcaattttataatcttattccagtactcaatgtagaagaaaatattactctcccactactgcttgatggacacaaagtagataagaagcagtttgatgagataataaaaatacttaacttagagaaaaggctcaatcatttgcctaaccaactttctggtggacaacaacaaagagtgtctataggaagagctcttataagtaatccggctataatgcttgcagatgagccaactggaaatctagatagtaagaatagtagtgaaatagttgatttattaaaaatgtttaataaaacttttaaccaaacccttataataattactcatgatgagcgtattgcattacaagctgacagaatcatagcaatagaagatggtgaaattaaaaaggatgaggtgattcgctcatgaatataataaataaattgactttaaggcatttaaaattaaataaaaagagaacaattgtaactataataggagtaattatctcagcggcaatggtaactggtgtggctactctcgtagtttcttttatggatgtaatgcaaagacaaagtatagccaatgaaggggagtggcatgttgtctataaagatattgataacgttcaactccaatcaataaaaagtgataaaaatacgaagaatgttattttgagtagggatttaggatatgcagtgttaaatggaagtaaaaatgttagtaaaccttacttattcatacaggagtacaacaaagaaggttttaggaagtttccagttgaattaagtaagggaaggttcccagaagctacaaatgaagttgtaatttcagaggacattataaacaatgctaaagttaactacaaaataggagatactctaactgctgatattggcaagagatattcgaaagataatcaaaacgacaatagagttttgacgcagaacgattattttcaaaagaataaagatactcctggagaaactttaacaaaggaaaatacaaaaacttataaaattgtaggtgtaataaagcgtcctaagtttgagcccacatgggctccaggttttacagtacttggttatgtagatgaaaataatgttacttcgaaggaaaaagaaaatgcgtttgtaatattaaaaagtattaacagaggattatttgatcatgcaaaagatatagcattacaaaataaaataaaaacagtagagtttaataatagcttacttagatatcatggagttgttaaggatgattcaatgcataatatgattcttggtttatcagctataatgattattataataatggttggatctatttcgctcatatacaatgcttttgctatttctgtatcagaacgttcaagatatttaggaatgctatcaagtgtaggagctactaaaagacaaaagagagattcagtgttttttgaaggagcagtcataggggtaataggtattccaattggaattatttgcggatttttaggtatgggccttacgttcctatgtgtaaactctatgattagaggagctttgggaattactgaaaactttagggtagttgtatcgccgttaattgttatcgctgccattgtagtttctgctcttactatattaatatcaacatatattcctgcaaaaagagcttcaagtatatctgctatcgatgctattcgtcaaacctcggatataaaattaacaggtaaagagataaaaacttcaaggtttacagaaaaagtgtttggtattgagggaaatataggacttaagaatttaaaaagaaataaaggtagatataaggcaacagtattttctttgactatcagtatgatattgtttttaagtgtaaactctgttacttccgatttaaagaaatctgttattttaagtcaagatggaataaactttgatataaatgtattgataacaggtaaaaatgcagaggaaaaaaacaatacagttaaaaaaataagcgctcttgataccataaaagagctcaaccaagtaaatacttttggtgcaaaggtatggattaatgaaaactccatggcagactacttgaaaggtgatgacaaaagtataatgaaaaatggagcatatccttatagtattaatgtaaatgcattagataacgaagctcttaaaatatatgcaaaagaagttggagtagattttaacttattaaaggatacaaataaaatttctgcaatagttattgatacagttaaatataaagatatggagacccaaaaatatgttcaaacaaaggcagtaaaagtaaataagggagaaaagctagatttactttataatagcttagaactagaaaaagatgagccgataacatcagtagaaatagcagctgctacagataaattacctacaggagttttttctcaagatgcaaatccagagtttaacattatagtatctagagaagtatttgataaaataataggtgttcgtgggaatatagttgaaagcatagatacaaacttatttataaagagtaatgatcctgtaacgcttcagacagatattgaaactattataaatgctgggagtgacaatagaatgtctattcaaaatgtatttatgaatagacaaagagaaaatcagatcattgtacttatgtcagtttttggatatggatttgttgcactaattatagctatctgcgttgcaaatatacttaacacaatatccactagtgttgctcttaggaagagagagtttgccatgttaaaatctgttggaatgacaccaaaaagcttcaataaaatgataaactatgaaagtatattctatggcattaaatcacttgcatatggacttccagtaagcattggaataatgtatttaattcatagaataatcatgggaaaatttgattttaattttattcttccatgggtaagcattttatcagctgtagtttctgtatttataattgttggtgtagcaatgctttattctagctcaagagtaaaaagggagaatattatagatgcactcaagagtgaatagtatcaatagaattatttaatatctataataaaaagttataaggaatattatccatatacattaataaaaagtaatttcagcccttcggacttcagaagcaccccagggggtatttatgagggaagaatgactgaacttgttaatgtaagaacgaaaaaatggtaattgaatgtgaaagttattaaaattgaagaatatagaacaggggttaggtacgcttcgcctccacccaataatcacctagattatgatacaatgcaaagccactgattttagtggctttcagtgttttataggaaaaaccgtggtagaaaactttaagtttttagcttaaatttatagaattttatgttggacatgcacaccaccgattctttttgagttagggagtgtgcattttttgttgggggtagatcttttggaagaaataatatttacaaaaaatattgttttaaaatgccattagtattgatccaaagtgaaatttttattttaagaagttatatggtaagttataattaaaacaaaagatgataagtacggattgtataaaatagaaatgcaaatcaagaataggattctagtatttgatataaaggagttgattcaaatgaaatggcaagaagttagagaaatgtacccaaatcaatttgttaaatttgaaattgtggaataccatgaagatgaaaaaactaaatatgttgatgaagttgcaattataaaagcaataaaagatggtagagaagctatgaaggaatttacaaaatgtaaaaatggtcaactagtgtatagtacagaaaatgaaagcattgttatagagaaaattaaacatattggaattagaaggagtatataatgaaaacaaaaatacaaataaaaaatggattactatatacttctataaaattaatacatgaaggaaattatgttattatcgataacgtaatccttgacactggagcattttatacaataataactacagattttttagatgatatgggagttgaattttcaaatgaagataagattatagaagcttcaggttatggcggagcgtctagttatgcagtaaggaaaagaattgatttgattgattgtaatgggattaaacttgataattttaaagtggattttggagaaatcgatccaaatgaaaaaattaacggattgttgggattagattttttaagagaagcaggaattataatagatttagttgatttggtaatgtatacaaatgatccaggaatcatactataagaaaaaatagggagtgatagtatgtatttaccggataatattagttaatagtggtggatttcaaaggtcacgcatcgcctccaccataaatattcacaaccgcctgtaggtggcttaaatagctacttacaagcggttgtgttttttgaagagtaagggtagggaatattacattgttaatggagatattcttcctataagattttttgtataggctagttttccatctatagttattacaacagcacccataccctcaatactattaactttatgaataattgaagcagcatctaatccaaacaattttgtagtatatatatcgcagtctatggatttatcagcaataatagttaaagaagctatattactttctattgggtagcctgttttgctgtcaaatatatggtggtatttacttccgtccttttcaaacactctctcatatattcctgaggttacaacggattgattttttattttgacaagtgccacagcatttcctcttggtagaaacggattttgtattccaacattccagtcaccgctgtttgatggtgattctccaaaaactagaacattgcctcccatatctaccatagctgaaatagccccattttccttaaaaaattccataactttatcagcaaaatagcccttagctatggctccaaggtctatttcaatgcctttttttaagaaatagacggtctttttttcatcatctagttgtatattttcaggctttaaaagttccagtacctttgctatagattctttatctggtacatgtgcctccttaaaacctattctccataattttattaatggtcctattgcaatatttaaatatgtattctcacatagactatgtttttttcctatttttatcagctcgtatagctccgcatccacttcttgcggagccaatgaagctatttttttaagcattgcaagctgtgagttatcactgttggcactaaatacttcttcataatgaatcagcatatcacaagccttttctgcaagtttttcagtagcctctccctttatatatagagagatttttgttcccataagatatattatcttcgtatactcattcatcttgatctcctacagtgtaattattttgcccatgaattagaaatgcatctataaggtctttatcaatatcagttagttttctttcactatgatatgctataaaataatctaaattcagctcatcaattggaatttgatatatgttgtattcagatgggcactcctttacatagacgctttctggtataaaggtcagtcccaaattactcgctgcaaggttacgtgcagtgttgatttcggtgctttccattatgacttttggttccaccttataaacgcttaataactgatctatctgctttcttatagcagaccccttggaagttagtatcagcttttgacgcaatatattgtttatgtcgatagttccttctggaataatggcgatgtttttctgatataaatcacagcagcgaggaataatagcacggtatccgtgtctgccccaagtaatagagtttaagtttggagaaatatttcttgaattttgtccaagccaaaaatccaattcaccattcagaatgagtttctcatttttttctggtaaagtctctgaaagctctattctacagtttggatgtatatccaaaaattttggtaaaaaaagaggcaaaaggtaggtcccaaggctaggaagtactcctatctttataaccttgctatctatatcagacacagctgatatttccctaatcagcttcgcataattattttctattgaagttaaatactgataatatatcttcccctgctcagttaagcgatatggcagcttgctacgacttataagctcacagtttaactgactttctatccttttaatactctgtgtcaagtgaggttgagaaatataaagtgatttggcagccttgccataattgctgtattttaaaattgcatcaatataatacaaaatatcctgagaatagtattttgacatttaactcatccttttgtgaaatatttaggcatatgaaaataaataacgagtcccaaatagccttgcaagtggacttgttatttatgtgatagtgccttaactcattgattcttgtgttcgattataacaaatatgttatcaaacttcaataaataactattagatataatatatgtaacatgttaaaattatatcaaacaattattaaaattatgaagttatgaaattttgaaatacagaaaggggattactatgaagtatttagcaattgtaggcactaactcagatgtgtcaactaatcgtatgctgcttcaatttatgcaaaagcatttttcgagtgaggcagagatagaactatatgaaattaaggatttacctgcatttaatgaaccagaggattctgatgttcccgaaaaggtagcagaattatctgataaaattttaaaagcaaatggtgtaataatagcaactccagagtatgatcatgccataccagcggttttaaagagtgctcttgaatggattagttacactagtcaggcacttactgacaagcctgttttaatagtgggggcttctcttggtacacttggttcttctcgtgcacaggcacatcttagacaaatacttgattcacctgagcttgctgctagaatcatgccaagcagtgaattccttttaggaaaatcacaaggggcatttgatagcgcaggaaatcttatttattcagataagctaacagaacttgatgaaatttttagagagtttcttctatttacagatattacatcaaaacttttagcagaaaaagttttacataaaaaagttaaaaaattcacatggcaagagtaggaggattaatatcaatgaaatttatagcaattgttggaactagtgcaaaaagatcatataatcgtaaactccttcagtttatgaaaaaatattttgagtcaaaggcagaaatagaaatacttgagattactgatgttcctatgtttaatcaatctgataatcagtcttcaagtgaagttatacagatgttcaataataagattactgaaagtgatggtgttattatagctactcctgagtataatcactcaattccatctagccttaaaagcttaattgaatggctaagctttgatcttcatccacttgctggtaaaccagtaatgatacttggagcttcacttgatgtccaaggttcttcacgtgcacaattgcatcttcgtcaaatcttagatgcaccaggtgttgatgcaaatgtaatgccaggatatgagtttttacttggaagcgcacacaaagcatttgatgaggaaggtaatctaaacaatgaaagaaccatagatttcctagaaatatgcttcttacgttttatgcgttttgcaaagatttcaaatcagcttaatgaagaagaagaatttacctttaacccaggagtatatgaggtagatgcaataggtcacagtggaagtcttccaatgaaagtatcctttagtgagaacagaatagaaagtatagatataaatatagatggtgagacagaaggacttgcagatgtagtttttgtaagaattccagataaaataattgaaggacagacattaaatgttgatgctctttctggtgcttcagaaactagtaatgctgtattagacggtgtagccaaagcagttaagcttgcaggagttaaccctgatatacttaagagacgtccaaagcctgctagcagtcttataaaagaagatgaagaatatacttgtgacgtagtagttgtaggcggaggcggcgctggattaagtgcagctgcaacagcgcttcaaaatggtaaaagtgctattgttcttgaaaaatacccagcagtaggtggaaataccatacgttcaggtggtcctatcaatgctgcagatccagagtggcagatgcagtttgaagaaaataaaggagaaagacatacaattgaagaactactagatacagatgagagtttaattcatccagaatacatagatgatttccgtgcacttagaaaagagttttcagagtataagaaaaagtttgaaacacaaaagggacatctatttgactctccactacttcacagaatgcaaacatattttggtggtaaaagaactgaccttaatggtaacacaatatacggccaatatgacctagtaaagatacttacagacagagctttagaaagtgttaaatggctagaagatataggggttgagtatgataagagcatagtgtttgctccagttggtgcactttggcgtcgtggtcataagcctacaaaaagccatggttcatcatttatacttgcactaacaaaatatgtacaagataactcaggaaaaatcattactgatagtccggtaaaggaatttatcatagaagatggtgaaataaaaggagttatagcaactggtgtcaatgggcaaaagataactgttcatgcaaaagcagtagtccttgcaagtggtggttttggtgcgaacacaaagatgctgaaagaatacaacacttactggagtgaaatagctgatgatgtaaaaactactaattcatacgctatgactggtgatggaatattacttggtaaaactgtaggagcagcacttacaggaatgggctttactcaaatgatgcctgtagctgatcctgaaactggtgaattattcagtggagttcaagtacctcctgaaaactttgtaatggtaaataaagaaggaaaaagatttattaatgaattctctggaagagatgttttaacaaaagctgcaattgaacagggtggtttattctaccttatagctgatgatgaaataaagaaaactgcagctaatacaagtcaagaaaagctagaccgtcaggtagaagcaggtactttatttagagccgataccctagaagagttagcagtaaaagttggaatggatcctgcagttcttgtagacacaattaataaatataattcatatgtggatgctggttttgatcctgaattccataaggatacatttagcttaaaagtagagaaagcaccgttttatgctactccaagaaagccagcagttcatcatacaatgggtggacttaagatagacactaaagcccacgtattagatgaaaatgataaaccaattaaaaatctttatgctgctggagaagttgctggaggtatccatgcaggtaaccgtcttggcggtaatgcattaactgatatatttaccttcggaagaattgctggtaaaactgcaattgatgaaatgaaatagttaaggtttagatacaaagacgaagagcctataacacgcataagtgaaaatgctgttataggctctttctcttattcttcattagatattgtacattataaaaattaagtttttcttttaaatgttcggtagagtatacatgatatcgaaatgggtaaaaggcctgcagataaagaataattgctactgaagttatatactaattacaggaaaaatatattgacaagcacaattgtatttattacaatttaattgaaataaatatttagtgattttataaaaaagataaattttggtttttgtatttttatataagtctgttatttatagctttaggcagatgtttatgtaagaaatgtatacttacaaggaaataagattatgaatgtgcaaaggaggatattatgcagattgtcttagatattttagtcattgcagtagcgattgaacatatttttataatgttgcttgagatgttttttattaaatcatcagttgctaaaagaacttttaatatagatagtaaacttcttgataaaaaagaagtaagagttatgtttgcaaatcaaggattatacaatggcttcttagccgcaggattattttggagcttttttataccagaattaatgtcaactcaattaagatttttctttttaggatgtgtaattattgctgctatatatggagcaattacatccaataaaaatatttttataaagcaaggtggtttagctatattagcaataattctattaatctatttaatgtaggaattaacatgagagaattaagagaaggtttgatttttaattaaaattttataatataaatactaggaaggaagtgttagaaatgaaaatagaagtatggtctgattttatgtgtccattttgctatatgggcaaaaggagattagaaattgctttaaataaatttgaacataagaatgaagttgaattagtgtttagaagttttgagcttgatttagcagctaaaaagaaatttgatggaaatattcatgaaataatagcaaaaaagtatggcatatcagtagagcaagctaaagcatcaaataatcaaattgttgaacaagctaaggccattggtcttgactataattttgataatttaatcccaactaatacttttgatgcacataggataacacactatgcaaaaacagaaggaaaaatgaatgaattagcagaaagaattttaaaagcatactttatagattcactaaatatatctgattataaagtgttggctggcctagctggtgaagttggtcttaatattgataaagctttacaagtattggaatcagataagtatggagcggaagtgagaaaggacgaagaaagtgcctcaaagcttaatataaatagtgttccttactttgtctttaataataaatatgcaatatctggtgcgcaacaacctgagttgtttttagagatattggagaaagtaagggaagaagaactctcattacttcagtagacgtatttactaaagatttctatagtttagttggtgaaggaaatacaatggaaaatttatagttgatttcttgaaaaattaataaagaactaagagttggctatttcaaaataggaatttaatttcaattttgaaatagcctttggtattttattagataaaatagaaagtactagtgagttattgacttaaatttaatttatatataaaatcaaatttgtacttaagaattagcttgattttatatacagaggagatagaattgtttgaagaaaaagaatgattataataaacaaataaaaaatggaaaagaaaatacaggtaaatgcattgagatgaaaaagtgcaatgaagaggaaaaagaaaataataaatgcaaaaactgtggagaaccagcaagttattttagtgatgaaaataatggttggctatgtgaggattgcaggagcatagaagatagattagataaacttgctaataaaatagagaaaaagctaagtaaaagagtttattcttttgatttaaatgaattaataaattgtttatctaaagatgaaatatataatatagcaagaaatcttggagtaaataagatatcaggtttaaataaaggaaaattaattgaaacattacttaaagaatataagaatttggttgaaaaaagagctttattctttgacgaggaaagatataggattttaaaaagttatgtggatagcaaaggtgtaaaactttttgatgatattgatgaagaggaagcagataagagtgtatattttatacagcaaggaatgctctttccaactgtaaaagatggtgtatcaatatttttaatgcctgaaatagtacaagcattaataaaagaaagaaataatattgaatatagacgtgtaataaaatttaatagtgaaattgtaaatatctttaaggcaatgaataaagtatatggtattttaaaactaacagatgctaaagagataatagaaagatatttgaatatagaaaattgtgaattagaagagttaattagagaggcaacatattactacaatgaatatagagaagaaggaatgtttattgttaataatgaaatagataatttcgatgaactattaaaggatatagatacagaaaaagatttgagttatgccatgatttcgaaagaagaattattaaatatgttagaagaaaattgggtttataatagtaaagcaggaaaaactttttataaagagtttactaatatgtttagagtagatagagacatgttaatagctatgatggaagacttgatttttgatgttcaagaaaatgaacctaaagatgcagtagataaaatgatagaattaattaatattgaaaatgaagaagccagatatgttgcatggagcatgatgaataaatttgttaagaaaattaggttatggagatataagggttcaaccactaatgatattaaatcaaatgtagttagcttaaaggaaaataaggatataaaaagaaatgatccttgtccatgtggtagtgaaaaaaaatataaaaagtgttgcggtaaagatgagaaggttattaatttatttgaataattattagttatttttttacggttcatttcaagatattattcattataattgctccttttatcttgttgtgataaaattatcgcgtaccttgataataatttaatataaatatttttacgagtacaattattttaatacatagtatcttaaaagataccaaggagtgtaagcatgcaagaaaacttaagcttagaaaatttaaatgcagaagaaatatgggaaaagttatataacagagaattaaattgtaagaagaacattttagaatatattgatattgctaagatactaaaaaagggtgaggctgacccagaaaagattcaagatacttataattttatctatgataatattgagaagatgtcagataaagttaaaccgaatactattatgtatcttcaaaatgaattaaaaaatcagtttggaaaatatgtagttgaaaaggagcctaaagaagaagatgcctttataaaattctttaaggaggcataccctgtaaaagatagaagaaaagattttacttgggttatgatgaatattaataacatagtagaagaacaaatttggactacattaattcacattaacagagaatatatatgtaaaagaattaaattagaagctgaagaaaaagaagctataattaaaatgatagaaaaggtaattaaaaaagataatataaaatatattaatcaaataaaaagtttagataaagtattaaataatttaaatattaaaatagtaaatgacaaggataaattcaaggttaaaaaattataattatgtaaaaagaattttaataatgcacaagagcattgttaaagttcttttttattgataaagatttttaaagctgtagtgatattttttatgtgacagctcactttttatagacaaggaataagattagtgaaaatgggctattgttgagcctatttttttaggttgttcttttactggatttacatgaattaccatgcagatattcaaatcattagaaatttcattttcaggtgcatcaattatttccttcgttatggccagttcccctatattagaagtattccatgttttatagattactggaggatttaggcattattatgataataaaataagcatttgtatttttaaatgtaaataatattgacaaaattctgtgagaataatatactatgaaataagaacgacgacgttcgacaaacatactttaaaaagtatatttttcggatgtcgtttttttatacaaaaaaataggacattataattagttgagaaaatgaattcgaaaattaatttttaggtaatgcgcagttacttttaagctaaggcatattcaaaaaaataaccagtccatctgctagcctattttccatcatcctgtgtcggcagattgcactaataggcttgctatgagcacaatccacctcattgcctgatgaaaaatatacatggcattttggactcattattttctttcatatgcctaacatactaagtaggattttatatggaaattaatttaggcgattgcagttttatattaatctgttcagcacttgtacttttaatgacaccaggactcgcatttttttatggtggaatggttcgtaggaaaaatgttttaaatacattgatgtcttcattctttgtttgtggattagcatcaataatgtgggttttagtaggttattcattgtcttttggtaatgattttcatgggataataggtggacttaatttcttaggttttaatggggtaggagcagagccttcagcatatgcacctacaatacctcaagagctttttgctgcatttcaaatgatgtttgcaataattactccagcgcttataactggagctttagtagaaagaatgaagttttcagcattgttcatatttgtagctatatggtcacttttagtatattatccaatggcacatatggtatggggagctggtggattaataagttctttaggtgccgttgattttgcaggaggaaatgtagttcatataagctcaggtatttcgggccttgtagcttgtattatgttaggtaagagacatggacatggaattatggcatatagaccacataatattccatttgtagttcttggagtagcattactttggtttgggtggtttggatttaatgcaggtagtgcgctcggagctggtccacttgctgtacatgcattcatgacaacaaatactgcagcagctgcagctatgctttcatggatgttaattgaaaaagtaaaacatggtaagccaacattacttggagcagcaacaggagcagtattagggttagttgcaattacaccaggagcagggtttgttccactttggtcatcaattataattggtatggcagtatctccaatttgtttcttctttgtggaaaaagtaaaagctaagtttggatatgatgatgcacttgatgcttttggatgtcatggaatcggtggaatttggggtggtattgcaactggaatttttggacaaactgcaattaatcctgtagcacaatggaatggtcttttctatggagatgttaaacttttcattgcacaaataatgagtattgtaataacaataatatttgcaggtgggatgactttcttaattataaaagttatgaaaatgtttatggatattagagttgatagctcagaagaagctgatggacttgatgtagctgaacatggggaatctgcttatccatcatttaatggattagactaggaatataatgcatgaatgcataaaatggagaaagtataatgttaaaaaatggaattaaaaaattctatggtggatttcaaaggtcgtgtttcgccgtcactatgaaacccacgacaatacattaagaggataaccgctgtatggcggcaattcacaaaggggctgtcgcactaaatatgttagttttgcaacagcccctttattttgctttgaaacatatccactggtgaaaatttaaacattcgagatatttaatttaatggtgcaagaataaagttaagttaaataatctttagaaaatccttagaaatatagcaaggtattctttaaaaattatgattattattagaatatagagccggtaaaaataagatttttagaatgaaagatggcatagtatttatatgattgtagaatatctatgatttattaagaaactaatacataattctttaaaactgatcatatttttatcacaatattttaataaaggaggatatcatgaaattaaactcttatcaaaaatcttttgtatgcattatactttttggattaattgcatcattatcatgttacatagttataaaagaaaataataaaacaacatcaataactaggcgtatgagtacaaatggagaatggacagattcttcaaaaattccttatacaattacttttaatcaaggagatattatacgatttaattataaatcaactattaaagatggaaaattattgctaagatttgttgattcccaaggaaacttaatatatgagtttgatccagggaaaaagggagaaaaggatataaaaatagagaaaaccgacatatatgagctttttatagaaggagataaatttaaaggaaattacgagataatatgtgaaaaatcttgaataataaagtagcaacttagtatgctatgttctacctttgagcactgcggcttatcaattttcttttctcttttcatgagtatgtacctccagtcttagagtttaagaaagcggcccagattgggtcgcttatatagttgtacttttttattcctactgaaacagaaaattttacctcaggctataagatttctatataaccttctgttccatttattctaattctttcaccatccttaataagtttagtagcgtcatctacacctgccactgctggaaggccatattctcttgcaacaacagcaccatgagtcatcattccacctacttctgttaccaagcccttaacaagaacaaagattggtgtccagcttggatcggtgaattttgtaattaaaatatcgccttcctctatttttgcttcattcatatttaaaataactctagcccgtccttcaacaataccagaagaaacaggggttccagctatagctccttttggcatgttacctgtatcatattcgcctgaaattatttctccatcagaagtcattatacgaggtggtgtcaatttcttataaatttcgtattcttcttttctcttagttatgatgctgtagtcaacatgttttgttttaactgcttctttaagttcatcaaaggttaaataatatatatcatctatgtctttgattacatcatcttgttttaaggtttcagcttctttgagtaatgcctgttttacgatccagaaataacatattaaaagatatttattgtactctctatagccagcaaaattacgtaaaacacttatgactttctttgtcttttttaacttcctattactaccaggcagctgcttcaagcggcttaatatttcagcttctttttgtttagcttcaagaagtccttggtcaaatttagcactatgggcattaggttcaaaattctttatattgcttagtattagtggaacaagaagcattggatcttcgttccatcttgttctggtaatatcaatttctccagagcagcgcataccatattttttaagataattgtgaatagaatcgctgacaatattacctccatctattttacttaagtcttcaaagaaagtttctctttttgcattctcaagatatttaattacagatggatactgccttattacatctgctacatcaaggagctctaatcccatttcggaagtaacgttgtttgatacagattgagcgagggtatctgctacacttttttcatcaagccatttcttcatatttttgtttatccagttagaggcataagatcctgcaaaataagctccatagactttaagcatagcagcctttatatcattcatgtcctttacaatgaaatcaaagagctcttcgccagaaatagaagaaaatattttttctttattactaagtaatacttgattttcagctacagatttttcaacaaaagatggatcatttctgagatattcttttatcatttgaattccgaaagataggatacctccttctacattcaaagatgtctttcctttaggaagcgatttaaggtattcttttcgtttttgaagatttataagtgcactcttcatcaaaacatctaccttgtctaaaccactgataaaaagctttcttgctattggcgaagcaagatcatgggatatatccatatacaatcttccgcctatcacaggcatatttgtttgtattccaaattgtttaaagaatatttggaagaaacttaaacctaatggtctcatggcttctgtcatcatttgtctatgagcaaaggataaataaacatggtttttattatcattaacttgtggtgtaggatataaagtagtaattggacgactttgaacaacatagaatttatcatcataaaggcaccactcaatatcctgtggacgaccgaaataggactcaatctttctacccatctgctcaagctgcaaaatttgatcatctgtcagtgtctgcatattttgacgttcgtcttcaatttctctttcttcagtacctccttcttttaatgcataaattgcaagttttttagcagatatctttttattaataattttattttcctgcactttataaatatcagaattcacgagtcctgaaaccaaagcttcaccaagtccaaagctggcatcaatagatactatctttctattagatgtaataggatcagctgtaaacataattcctgcagcttgaggaaacaccattttttgaataactacagataaatgaaccttgtcatgatcaaagttattttgcatacgatagattacagctctatctgtaaacagtgatgcccagcacttactgatatgcttaagaatagaaggttttttcataatgtttaaataagtatcctgctgtcctgcaaatgaagctgttggtaaatcctcagctgtagcgctagaacgtacagcataagcatgtctttcaccaaactttgaaagataaaaggttatttcatcatcaatgtcctttggaatttctatctcctcaataaccttacgaatctttccgcttatttcaccgattttttctatgttttctatatttaaaagggataattcacttaatagtgaattaaattcgttgttatttccaattatctttttataagcttcagtagttatacaaaatccttctggtacaagtattccattaatcctagataatgctccaagattagcacccttacctccaacaatcataagttttgttttatcaatttcttgaaagccaagtacatatggattcatagctattttcctccttaattcaatgcataaaacaattagataattttattattaacccttaattatttttgattccttctttaattatattaatggcatcgataactttttttaaatactcattttcattaaagccgcttttgaaaaattcctctaagctatatgagaaaagcatatccaaaactatatcagtattaacttcctgccttataagaccgcattccttattatgttttagttgttttctatacttttcaatggaagcagtacgaaatttagcaataaattcagagttatccatttgcataagcatacctatcttggtgtattcaggtttagcattacctaattcaagtgaatctttagttttttgtataaaagtttcaaaaaaatcagcgtctggatttaaaactctttcagggataagttttttcttttcatttgaaatttcttctatcatatataagtagaggtcttctttatcattaaagtattgatagaagcttccacgtggtattccagcagttttaataatctggttaatagatgcatcgctgaaagaattggtggagaattcctgtatagcagcattaaaaattctttgctttttatcttcatttaaatttttaaaagtgtcttttggcacaatatcatctcctcttgaagacatcatagcataattaattttgtatgacaagtatgtcatgtgacaaagttgtcatgtaagaaatggaattattgagcatgagggataagaaaaggtgaagaattacatccatcaatatagtctaaagctctagattagagtttagaattattaataaccatcttttggtcgtggtttttattttaaagtcttaatataaagaatattgacttctaaaaatatttgatttagtataaagttatacttagttcaaaaatatacgaagtataaaaatcggaggggttttgatgataaatagaagagaacgtaaaaaagaattgactaaggaaataataattgatagtgcattagctctttttgaagaaaaaggttttcaagaaacctatatggaggaaatagcaacgaaatcagatatttctaagggtacgttatataattatttccaagataaagagtcaatattatcagcttattttcaggctcttataaataatcatgataacaattttagtgaagttagtgaaaaattcaaagaaacaagagatataaaagaaacattgaataagatactagatttcataaatcatatatttagagaaaatattcaatatacagcaatttattttagatacagactccaaacactttttaatgttaatcccatagataatactaatagaagtggattggaaaatttgatttcagaagttataaaaaacgcgcaagaaaataaccagcttaggaatgacatttcttcaataataatggcgagaaattttcaattcatgtatataaattattttatttcaagtatttatggaaatgagaatatcgatttagaattgtcaaagtgccaaattatagaattatttttaaatggagcaaagcttcaaaaaaattagtggagtaagggagagaataactatgggaaataagtatacattgtattttgatgaaatagataagaaagatttatcacttgtaggagggaagggtgcaaatctgggagagatgactaaggctggttttccagttccttttggtttttgtgtaactacagaaagttataaggaatttataaattacaataaactttatgattttattgtagaagaaattaaagatgcaaatcttgaaaatattgctaccataggagctaaaataagagaaaaaatagaacaagcagagatgcctaaaaaagtagaagaagaaatcattaaagcagctgataaggttgggattgataactattatgctgttagatcgagtgctactgcagaagatttagcttttgcctctttcgcaggtcaacaagatacctatcttaatattaaaggaaaagcttcactaattaattctgtaagaaattgttgggcgtcattatttactgatagagctatactttacagattgcaaaataaaattgagcacgaaaaagtgcatatgtctgtagtagttcaaaaaatggttcttccagatatagctggtattatgtttactgcagatcctgtatcagggcatagaggaattatctctattgatgcaagtttcggactaggggaagcgttagtttctggtcttgtatctcctgatatatataaatttaataagaaaaaagaggaaataatagataagactatagcagaaaagaaacttgctataatgccaattcaaggtggtggaactaaaaaagttgatattacaggtgaaaaatctactaaccaagtcatggaggattctgatatcaaaaggcttgctgaacttggaatgaaaatagaaatgcattatggctgccctcaggatattgagtggtgtttagaaaatggtgagctgtatattgtgcagagccgtgccattacatcattatttccacttccaatgcctaataacaatgatgataacacacatgtatatatttctttaaatcaccttcaagtgatgactgatccaatatcccctttaggtcttgatttatttagagacatgctgccttttggaagaaacattaaaagagaagaaaaatataaaattttagcttcagcaggtggtaggatttatgcagatgtaagtgggtttatgcattctgagaaaataaaggaaaagcttttggctttattaacaaatgcagatgctttgatggcagaggctttaggagagctttttaagagagaagaatttaaggaaaagtttaaaggaaagaaagctaaattaaaacctttcttaaaatatatagctcctgcagcagttaaagttataaaaaatattattttcacgaacctagatggaacggtggagtttatgaataattacattaaacagcgtgaagaagataccttgaaggcaattttaaattcaaagcaaggtactgaaaagttaaatataatacatgaaaaagcaagtctttatgaggatgctaaaataatacttccatatttagccccaggaattattgcctttaagtttcttgaaaaactggaaatgaagcttttagaaacaaataattatactaatataattgcaaaaggcttagaaggaaatattacaacagaaatgggactacttactggagacttagcggatatggtgagaaaatctcaaagcttaattgatgagtttgaaaataaagattatgaaactttggtttcaagaataaatgaagttaaaaggaatgaagaatttaagagattttttaataattttataaatatgtacggagtgcgtgcttcaggagaaatagatatagctagagatagatggattgaaaatcctgagccacttgtaaaatcaatacttgcaaccattaaaacttcaaaggaaggcactcatagggaagaatacaaaaatactataaaaaaagctaaagtagcaacagaaaatatggtagaagaaatacaaaggaagcatggcaaaattaaagcgaaaattgcaaaaaggcttatacttgttttaagaaattcttttccaataagagaacatcacaaatttatgatgatgagactttgcatgatttttaagaaggaattactaaaagaagcagaaaatttagttactaagggttatttaaatgaagaaaaggatgttttttatgtaacgttcagtgaattatatagagcaattgaaaataatgaaagttttaaaacaatagtagaacaaagaaaagaagaatatgaacattataaaaagttaaatgctcctcgtgttattacaagtgaaggagaagaaataaaaggaggatataagatagggaatcttccaaaaggagcgctcccaggcattccagtttcttcaggagttattgagggaattgcaaaggtaataactgatccttcaaaggcatccttgaataaaggagagattcttgtagcaccattcaccgatccaggatggacaccacttttcataaatgcagctggattagttatggaagttggaggtctactaactcatggaactgtagtagctagagagtatggaataccagcagttgtaggaatatcagaagttacccaaaagattaaaacaggtcaaaaaatcagagtagacggaaataacgggtatgtgatggtaatagaagaataggcggtgtattttattaatcaataataaaatacaaaccttgataaataataattggtgaatttcaaaggtcgcacttcgcctctacatgaaatccacgaccattgtatgtagcttaaatagctatttacaggtggttgtggatttctcctataactggtggcctaatcctatacattttgcaaaagatgaaacaatctataaattaatcaatataagaatttaagcaaagatcttgaatactatcctttgtgcaatctttcattgctaactatatttttagcaattttgtgagctgtctttccaatttcatctgcattcatggaaataagatttccatcttttgatactaactttccgttaacaatagtcattttggtaaagcttgaatttccaaggcatactaatgaaacaagtggatcatggcatcctgcatactcaatcttgttaagatcaaatagtattatatcagccgcctttccaacatcaagtctcccagtatcaggtcttcctaaaacatctgcaccacatctagttgcaatctttagtatttcgtatgcattaagtccgtcagctccatactttagatgatttagaaggtacgcacgtctaacttcttcccacatgttcgaaccatcgttacttgcacttccgtcaactgctatacttatatgtccaccttttttaaaaatttcggaagttctacagataccactattaagtttcatatttgacgaaggacaatgggcaataccagttccattcaatctatctatttctgaatcgctaaagtgtattccatgtgcataccaaacatcaggaccaagccattcaagttcttccataagctcaaagggtcttcttccatatttttcgatacaaaatctctcttcatcaatagtttctgcaagatgagtatgaagcataactcctctttttctggctaacttcttagtttcaagcattaattctttggtaactgaaaatggtgagcatggtgcaagagctattcttgtcattgcaaaatcatttgtatcatggtatttgcttataagtctatcgctatcctctaatattttactttcagcttgaacaactgacattggaggaagtccaccatgatctctgcctaaagatatagaacctcttgtagcagtaaagcgaattccaatttcttgtgctgctctaatttgttcatcaattaatgtgtcaggttggttctttggaaagatgtagtgatggtctgaagttaaggtacatccagttcttaaaagttcactaaaacctactagtcccccataatatacagcatctggagttatatttttccaaaattcataaagcccaataagccatgggaaaagtggcttttcttgaacttcttttattcccctaaatagcgtttgatacaagtggtggtgagtatttacaaaccctggcaaagccacaagtccagtacaatcaataatttcggtttcagcaggtacttcaaggcaagtagctattgaagtaattttaggcccttcaattaatatgtctacattttcaaatacctcttctctgtcattgaatgttatggcatgtctaatgttctttaaaattaatttcttcatcataaaatcctccttaaaataaaaaaatcgcaggcgaataagatttcttttttattctttttacgaatcgtaactttctgaatcagtctttttcataactcataccctcaagtggcacaatatccacagatttaacttgaatataaatttctaaagaataaaaaaaaccactttgaaatgagtaatttcaaagtggttaactctacacgtttttgcgcaaatataaaattatattttccttggtattataatatcaattattttgatatttgtatagttttatttataatttttgtaataaatttcatctttcatatgaatatagaaggattcctatggttcagtatctaaaaatataatttggtggatttcaaaggtcacgctttgcctcaacaagataagaactttctctaatcttcaatcataattcccaattctacatattaaattttaattgaaacatatatgtgcttggggatggtgagaaattttggagaggaaatttaattataaataatatatatgagaaatttaatactataaatgatttaacaattttataactgatttagttgactttatagagaaaagcagttttaatagtagaagaaataggtataatgcttgatggttatatccaaaataaaggagtaaatttagataaaaactattttttagaaaaaagggatgataatataatgaaaataacaatgtatggggcggcaatttgcccagattgtgttgaagcaaaagctattttagaagaacataaagatatagaattggattacaaaaatattaccgaaagtactaaaattctaaaggaatttttatcttatcgtgataatgataaaatgtttactaatgttattaaagatgggaaaataggtattccgttttttattttagaagatgggataaaaacattagacatatttgattatttggatatagaaaagcctaagaatggtgcaaatagttgctctattgatggtagcggtaaatgttaatatttctggcacgagaatataaaatatcgttaatgcctagcaagcgcatttaatatgttcaaataccatcgaggtataatatttttaaactggtataatgacggagcataaatattaacaataataatagatatattgttgttaatgattttaaaaggcaactaaattaaatagttaaatttcagacttaccacatagaaaaaataataatcagaatgaatgtagtgcaagaaatttataggtatgcaatatttcaaaaaagttaatctctattgctaaagattaaaaagtgactattacaaatagtaatagtggtgaaaacaaactctgtttacatacaatggagtccaggcaggaatttatttacaaagaatactttaagcaatttataaatatgtacctttactaggaaaatatatacgtataataaaactgtcccaaaactgtattttgaggcagttttatttatatatataagcctatatatataaattatgctatcttatttttttaagcacattgcatcttgaacgtgttctaagcattcaccaaatctttgatagtgaacgacttctctttctcttaagaatgttaatatttctttaatttgtggttcatcagttaagtgtattaaattttcataagttgctcgtgctttttgttcagcagctaaatcttcatgtaaatcagcaattacatcgcctttggcttgtatataagttgcagtccatggatttcctgttgcatctgtataaaatactgcttttctatgatcagcataatgcccagcaagtcctgctttttttatctcttctatagttgcattttccataagttgatataccattgtagcaattatttctacatgggccatttcttctgtaccgatatctgtcaataatccttttgattttccagttggcatagtataacgttgatctaaatatcttaatgcagcacttaattctccatcaggcccaccatattgagttaccaataattttgccatattaagatctttgcattttagatttactggatattctaatgtttttacataataccacataaactcttattcctcctccctgctacaattttcccaaggccatggtgtatttacccaagcttttggattttctacatatgcagatccaaagtttgttaatggaccaaagttcttttcatatgcgctaattagttcagttaacttacaagataccttgttgtaatcttctttagcgtttttatcttcaggaaaattgtcgaggaataggtttagttctacagcacaaaactgataaactcttatactatttagcatatctcgttggttcataatattatatcacctctcgtatttgattttcttgtattcaaattcatattcatgatcatactcattttcgtgctcatgctcatgttcatgatgatcatggtcacaatcatagcctttatgatcatgctgttttttatatggtctgtaaaggtctttaaatattgttccttttacgaaaccttctttgcaagaatacaaattttcatatttttgaggcaatatatatgcgcgtgcatattcatatttttttgaatgctcttttgagtattctttagaatattcttttgatttacacatacagtcatcatcgtcgcgtctgtacataagggttaacactccttcatttgttgttcatttatataagtatcttatgcgtattatgaaataatgtgataatttataaaatatattttgaatttttgatattcattgtctgaaaatgttataaaggagtgtgaaattaaaataaaggcagtatttagaaaaactaattactaccttcactttaatttagataaatatgaccatctgtaactgaaacaaagtaactgctatttaagccgtatttttcgagtatttcaggaattgttttatcatatttcatttcatctattttttcatttattgcttttgctaaagtaatatcatttttcctaacagcagcagctattttgccaggggattcaggagtataatctgttggaggcaataccctcaaatataaattacttcgaaagatcatatatgaagcaaaaatagaatcagttattgcggcatctatttttttagtacttactgctgataatagatcattttgatttttaaatgaaactacatctttaacaacaccctctgctttccatttattggctagatctagaaaagctgttccaacttgtgcacctattacagcatttttaaaatcttccttaaatacaattttagatactttaggggtaattattgcttcagattctttatataatatatttgtaaacaatgcttctttttttcgttcatctgtaacatacattccatcagctactatatctatgctatcatctgtatttaattgttttaataaattgttaaatggaatttgcttcatttctaccttgtttatcccaagccttttagcggcttctcttataatttctgcatcaattccagtgaattctttagtttttggatctatgtaagcaaagggaatatcatttgaagatgcgataaccagtagccctttttcttttactctttccaatctatcttttgtcatttcattattcggtatattagcgccacaaaatattaattgaatgatatttattaataacatagcaaaaacaagtgattttttatgaattttcatatactaaatttctcctttttattattatcttaacttaatataaaattattcattaaagagacttataatatatatgctgcaatttaaaatgtataattcacgattaagactaagagtctttaaatatttttggaatatatattaaatcaaaagattttttgtaattaaggttatgttaagaaaaagaaggtataataaagggtggtaaaaatctcaataaatagttatgatatagataaacaaatcataactctaggaaattatttatcttataatgtattattttgttgaaaaagaggaatttaaatctgattagcgaataataaataataatagatttgacttatagtcagacaataaatatatggggtgaaagtccgaatgaaatgtctagtagaaataagcaatgatttctcatcttgggatgattttatatcgactataaatgaaaatccaacagcgagacaaattacattagagtcatggaaaagatgcgagaagttaggaatgaatcctaaggaagtgaaatttgagtttttatcaagcagggatcttgaaaaaaagaaaaaggaaaactctaaactaacagaaatatcaaacttgtatatggattcactatctatgagtttagcaaatattccacacataattgctttatcagataatgatggatggatcattgagtttagagaaaagactgaagaactgggtggaataatagaaggtttttctcttggggtaaattggtcagaagaaaatattgggaataatggaataggcactgcattggcaatggggcagccaattttggtttatggggcagaacactatggtatgcctgattgtaagtgtggatgtataggcgtgccaattataaataatgaaaatgtcataggggcaattggaataagtgttccagttgaacatatgaatccggtaaaattacactcttttatagcttgtataaattcaattgagacagccatgaaatatattaatgataaatttagtaacacatcaactggaatcaatttagctgcaacaagtgaattaattgcaacagctgttcatgatctaaaaaatccactatctgtagttagagggttaggtcagcttggcatagcaacttcagataaagctaggatggacaattattttgatagaataattaatcaagttgatgaaatgaatgatatggtaatggaactcttaagtatatttaaaccagaagagctcacaccacagaaggtaactcctctaataaaagatgttttaaactcatttcagcctatttgcactcataaaaatataaagctatcattggtagacaatgtagatgaatatgcaaacatatcaaaaaagcttttaaagagggcaatagagaatcttataaacaatgcaattcaagcaatggacaatggtggatcaattgaagttacaactgaaaaatataaaaattccatacttattataattaaggatactgctgggggcattccagaggaaataaatgagactttatttgaacctttttcttttagaagaagtggaggaacaggacttggcttgtttatggtctatcatacaattactaatattcataagggcaaaatatggtttgacacagagctaggtaagggaacaacattttttatgaagctaccaataacaagaaatgttgaaaatatctcagttaagcagttcgagttgatttaattaaattaaattaagttttaatatagtcctatattgacttagataaaattagaatgctataaaaaatatttgaataaatttataaataaagtttaacattttctgaaactaacggtattttgatgtatcattaaaataataataaaacgatattttgtgtatcactaaaataataacaaagtgaaaggattagatttatgtcaaaagtattgaaattaataaagtactttttaggatttattggacttacgggtttaatttatatatttatttattattctgtgataagtaaattaactacataattagaaagtatctgtggcaatgcacatttcacaatgtacaattacggctaaaattcttgcaagatttttagaattataatgaagaattatttttgcaacatatatataataatattttttgaatttcattaagctaatgttaaggtagtataagtataataaaacttgtaaaaaagtttttttcattttcatttcttaataatataaggctatgtttaatataattctgaaatatagccttaaaaattacaaatgggattgtctgcctataatactaaatatatgaaaattgcacacaaaaaaatcgcaaattcattttctttaataatacgactttacatttattatttaattttttgattaatgatttatgaatattgccttttagtgcatatccatatagttttgtttcttaatcaagtacgaaggatggtataattttgttggtggataatattcatcatgggtgtaaacaaatccaagtttttttagcaattgagcagaggctgaatttttaggattatgtccagtaaaaagtgcattagcattaagatttctaaaagcatattccattactgccaaacatgcttctttagcaatcccttttccccaatacttctcttttaaatgaattcccatttctaatatattattctcatgatcatatggacgtaaaccacagcatcctaaattttcattagtttctattaaataaattggccaatattgaatattgtaattgttgtaattttctatttcctttcttagcctttgttgtacttgttcttttgacattgtgccttctgccgtgataaattttgttacttctggatttccccataattctaaagcatcacatatatcatcttcactccatcttgaaaatccaattcttattgattttaaaaaaaattctttcattatatacgctcctataactttacaataatctactattgtttattaaactatagtttttaataacaattattataacataatttacaaaatgtcacgcaagccatacatacatctgctctctatttttaagtcttttattttgatatatgaatgtgttacattgttttgaactataaagtttttagcctttattatttcttcatctcagcgaacgaacgtgagtggaaattatattgatatcagcccaaattgaacatatatttgttccatatgaatatgaaaatttctctgcttgagatatttcaaattttcaatggggaacctatatagatatcgaaaccaaaagatatactcatattttaatctttgtgaattatacttgaaattagatacatgtttgtgaaagcggcatttgagattgagttgttatagttcttagttgaaggttgttccattttctgcctgtcctaaacttgcttttggagcatgcagaaatgggttcaaccttcaacttagaaatatccagcgaaaatttcattagtccgctggaacaacagcataatccttatttcggggacttatatgtataagttcaggtttcagttggattatttctataattatttttcaaaaaggtatttacaaataaagttaatagagttaatattaatacatagaatcaaattgatattatctaaatgataaatagtaaaaagttttcaaatatatagaggtgggtaaattgaatcaagaactattagataaaaatgaaagagaatttttaagtgaatatgatgtaaatatttatgatagaccaagtgttacaaatgacattattatatttacaactggtgataagatagaagagaattcaagaaaagtaccaaagaagggaatgcaagttttattaattaaaagagatgattatccttataaaggaaagtgggcaattccaggaggctttgttaaaaatgatgaaagtttggaagagggggcgttaaggaaactaaaggaagaaacaggaattgataatgtatatactgagcaattatacacttttggagaagttaatagagatccaagaacgagagtaataagtataggaaatatagcattaatatcgaaagaagatattagatttggtgattataaagataggaaagaatcaaagtggttttgggtagaaaaaaatttagttgattctaaaaaagatgagacgcataccataaataaatatattctaaaatttgaaagtgaagatgaagaaataaaatttaattatgaaataatagaaaaaatagaaagaactatttttaggaaaaaggaaaatagttataagacgttaaatgaaagtaatgatgaattagcttttgatcattataaaataatagattatgcagtagacagaattagaaataaaatagaatatacgccaattgcactaaatcttttgcctagattatttacagttaaggaacttcaaaatgtatatgaagcaataatgggaagagaaatcttgaattttagaagaaaaatggaagatatgattatagaaactgatgaaaaaatagaggggaaaccttttagaccggctaaagtatttaagtttaatgaaaactgggagcacaatttttagactaaatgtaagttattaataaaatttaatgatagagaattgagattttatatgagaggggataattaaatgatttttttaaatgacaaagaaatagaggttaaaaagtttcctaatggggaaagtttaataaacagccaagagttaaatattaaagaatgggtaaataccattaaactcaaatttgaaagtgataatgatataactcatttgatatttttaaaggatcatttggatgaattaaatattaaatgtaatcttataattccttatatgccttatagcagaatggatagaacagaagggtttactgtatttaccctaaagcatttatgcagacttattaataatttaaattttgaagaagtatcaatttatgaaccacattcagatgtatgtgtggcattgctcgatagagttaaagttataaatatgtccgcaatattagcaaaaaatttattagaaaaagtagatgataagaaagattcagtttacttagtttatccagatgcaggtgcagctaaaagatatggtaaacaaattcaatatgaaaaaatattaactgcaaacaaagaaagagattttaaaacagggtttataaataagcttgaaataaacggaactgtagaaagtaaaaaatttaaagctattattgtagatgatctatgctctaagggtggaacctttattttaacagctaaaaagcttaaagaaatgggtgcaactgagatttatttggtggtaacacattgtgaagatacaatttttgatggagaaattttaaagactgatttaattactaaggtatttactactagcagcattttatctaaagagcatgagaagttggaaatatcctctattgtataacttaggcttatgcaataatccaccgaaaggagaaacattgttatttcacaggactatgaaaatttcgctgaaagcgttaaatcgtagattgcaccaccaatgcttgctccaaatttcattgtgacaagcattaatggagcaatctacaattaagagcttttaacagctcattttcaatgcctgctgcataaaaatgtttctactttctaatatagtatttattgcaaagtataaatcaagttcttgaattgtttatttatggatatccaatttaagaataaaggaatgtaagaatttaagaatttacatttttaacaatgaaagaatttaaaaagctaaaattgaaaatatttttaaagaaaaaaatataaaatgttattgttaaacgttcgtgtgtacctatgccagaaatgtatgtaatttcggtatatcaccacacaagtctaagttgaaagttggatatctaaaattaaattatagagattggagagactattatgaataaattattagtggttatagattatcaaaaagattttgttgatggagctttagggtttaagaaagcagaaactttagaacaaggcatttatgataaagcaaaaaaatatttggaaaatggcgataaggttttattcacttatgatactcattttgagaattatttagaaacaagggaaggaaagaatttacctgtacctcattgttatataaatactgaaggtcatgagctttatggaaagttaaaagaatttgtgggcgtagagaatacttttcattataataaaaactcttttggaatagcgccagcagacatgttaaagatatcaaaggatgttagtgaggatatagatgaaatagagttagttggagttgtaacgaacatttgtgtaataagcaatgtagtcacatttcaatctcagtatataaatgcaaacttaagtgtagatggaaccttatgtgcaagttttgatgatagtcttcatgacaaagcattagatgtaattgaatcattaggggttaaagttacaagataggagggatatagatgatagatccattattattaactgatttttataagacaatacatcatatgtgctatgcagaaggcatgacaaagcttgtaagctattggactccaagaatgtctagaaaagaaaacatgaacaaagtagttatgtttggacttcaatcttttataaaaaaatatttaatagaatattttaatgaaaatttcttcgccattcctaaggatgaaattattagtgaatataagagagtgatatctagaacaatgggaagcatcgcagcagatacagctcacatagaaaaattgcatgatttaggttatttgcctatacaaataaaagcagtcaaagaaggaacaagagtaaatataaaaacacctatgattgaaatcactaatactcacgatgaatttgcgtggcttgtaaattatttagaaacctttatgagttgtaatatatggcaaccgatgacaagtgcaacaatagcatatagatatagagaaattgttttaaagtattttgatttaactgttgaaaatggtgatgtaaaaaaagcttgcggtgattttagcatgagagggtttagctcaattgaaagtgcacaggttagcagtgcagggcatttactttcatttactggaactgcaacaatatcatcaatactctatctagaaaaatattataactgtaatattgaaaatgaaatagttggacttggaaccccatcaactgagcatagtgtaatgtgcacttatggaacggatgagcgtaaggcttacaagagattaattaatgaagtatttccaagtggtgttataagtatcgtttcagatacttacgattattggaaccttattactaatatccttccaatattaaaagaggatatattaaatagagacggaaaggtagtaatcagaggagatagtggagatccagtgaaaataatctgtggtgatagtgaagcaccaaataatagtccagcatataaaggaactgttgaacttttgtgggatatatttggtggagaaattaactcaaaaggatataaagttttaaattctcatattggaacaatttatggtgatagtatcacagttgaaaggtgcgaagaaatctgcagatgccttgcacaaaaaggatttgcagtaagcaattgtacttttggaattggctcttacacctatcaatataatactcgtgatacctttggatttgctcttaaagcaactcatgcagtaataaatggagaagaaaaattcatatttaaagatcctaaaactgacacaggaaactttaaaaaatctcaaaaaggaatgtgctatgtatacaaagagggagaggacattctttataaggacgagcttactataaaacagcaggaagaatgtaaggataatttattagaagtagtttttaaagatggaaatttgattaaagattattcgcttaaagaaattagagataagttacatggagagttttagttaaagataaagcatcttgtttttattgctattaggaaaaataacggagatgcgctaggtgcatatgggtgtggtgtatttagaaatgaccctaaattaatagcacaatactggcgagaacttctaattaacgaaaattttattagttactttgataatataatatttgctgttttagataactccaaaaaccaaaactgcataaaagcctttgagggattagaaaagtaagatatttattgtatttttaagaagggaatgagaattttgtacactattgaagagattcttgaaatgaaatacccatatgagctttttacaggtaataaagaaacagctaaaaaagaacacattgatcttcttaaaatatttcatccagatttgcatagggattcagagaaatacaaagaggttacaagtaaaataaacgaattatattctgaaactgttaaattattagacaatggaaactggattgaagatggattaattaaaataacaagttctgatggcgaaaaatattcaatgaaatataatgtagaatattcatttgaattaggaagctatttcattggtaatagatcaattttatatttaattgataaaaagcataaggattttgtagaaaatgcattggatagaatcaagaatttaaaatacgagaataacaacatgaaatctgaattcgaaaagtattttccaaaagtgttaaaaagatttgaaactatggataagaagataggattgcttatagaaaagccggaagatgcctattctcttaaagatatattaagttattatagcagcaaagttccaccaagacatgtaatgtggattctaagcagtttatataatataacttgttttctatattataataatctatcacataatggaataaatattgataattattttatatctccatcatatcatagtggatttttgttgggtggatggtggtatacagtccctatagatgggaagatgcttggaatacctagcgaaatttatagcatcatgtctccagaaatgaagtcatctaaaacaggcacatttctactagatttagaatccatacggctaattggaagaaccttgcttggcgataagaatggaatgagttttattgaggattctgatatacctaagccacttattgattgggccagaggagtctcagtaaacaatccaatggaagagtataagctttgggaaagtgtgattaaacaaagttatggggaaagaaaattcatagaaatggatattgatataactaaattgtatgctggaaaaattaataagtaatatatatatgttacaaaaataatcattcatcataattcaaaaaaatattgcaagaattttagtcgtaattatcaatcgtgaaatgtgaattatgcatttttcattgtgaattgcaatatatgagtatttaggaggtattaaaatgggaacaggaagatgggattcaaaagcttgggatagttacgcaagtgcaactataaaaggaaagagaacagtagatgatgtctttgcagcgaggaaacttgatccaagtttaaatccgtatgaagtaagttttagggaaagttgtgacagcagtgacaacccaaactcaacaccaattattattggacttgatgtaactggttcaatgggcataattgcagatagtattgcaagggaaggcttagaaaaattagctactgaaatatatagtagaaagcctgtttctgacccacatatcatgtttatgggaattggtgatgttaaatatgattcagcccctttacaggtaactcaatttgaagctgatataagaattgcaaaagagttaactaaaatttatgtggaacatggaggtggaggaaataactctgaaagttatactttaccttggtggtttgctggaatgcatacaaaatgtgataattttataaaaagaggaaaaaagggatatctatttactataggagatgaggagtgtcctaagactgttcttaaaaatgaaataaaaaaagtctttggagatacaatacaaactgatagtatgtcagcacaagatttattaaggcttgtatctaagcaatatgaagtatttcatattattattgaagaaggaagtcatatgcgttatcagccagatgaagtaataaaatcatggaatgatattttaggccaaagagttttgagattgtcagattatacaaaattgcctgaacttatagtatcaacactacaagtattaactggagaagacaaggataatgtttctgacagttgggatggaagcacaagcctaataataagaaatgctataaaagaattaattcctaatgtaaaagctgatgatggacttgtaaagttttaatgttattggagatgtctcacaaagaataaaaactacagtatattgtattaaatttaaaaattctaatacaacatactgtagtaaattttcttaatggaacagctccatgtttaacatcatgagaggagagcttggcatgaaatctataaaagtgataataggttctaattttggtgatgaaggaaaaggactaatgacagattacatgtgttctataaatgaaaatccagttgtgattcgattcaattcatcagctcaagcaggtcatactgtagttacaccagatagtaaaagacatgtatttggacattttggagcaggaagtttacaaggcattccaacttttttaagcaattatttttcagtgaatcctttattatttctaaaagaatatgatgaacttaataaaataggaattattccatatacaatgatagattcaaattgccctgtagttataccacaagatatgatattaaatcagatattagaaagacatagaggaaataataaacatggaagctgtggccttgggtataatgagtcgattgtaagaaatagtatccatagatataaaataacctgcggtgatatttttagcggaaattataaagataagctggagcttataaaaaaagaatatatagataagagagttgaacagttaaatttaaagtcttccaatgataatttaatgaatatattatttgatgcaaatataatagaacattttatttatgatgttgataacaattttaaatcaaaggtagaactatctaatatagaaagtgttttagaaaattatcaaactcctatattcgaaggcgcacaaggattaatgctatcagaggactataaatattttccttatgttacccattctaaaacaggtgtaagcaatgtgatagatttgttagaagaagcaaagccctgtgaactggacatagaagtaatctatgtaacaaggagctatttaacaaggcatggtgctggaacattaccaaatgaaatgaaagagaagccatacaaaaatattacagacctaactaacattcaaaatgaatttcaaggtgttttgagatttgcaccattagacatagatttattatcagagaatatagaaagtgattataataagattagcttcaagagcaagaataaaaaaatcaatataagtaaatctattgcaataacatgcctagaccagatagataataataaggcagagtattataaagataatagtcttctattaaagaatactaatgagtttatagaggatatacttagaaagatcaatcctgataattgttatttaagttatggagtatctagagatactattgtaaaatatttaaataaggtttgaatatcataatttatttaaaataaatagtgaagttgttatagatatctaactttaaaactagatttatgtggtaacttaccgaaatcataaatattttgattccgaaaagctatgaaaatatcgctgaaggttctaagcagcaggttgtatccactttagcatgctccaactttcagtttgacaagctaaaatggaacaacctacagctaagaacctttaacagctcattttcaaatgttttcttcacaaatatatttatgatttctggtgaagatatgagcttaaagttttagtaactttttaaatatgttcatctaataagtcgaattcttaaattggagatctatatagataagctaattataagttagatttatactatgaaatatatccaaactagaaatgggtaatatacttttgtggaatgtttcattggtaattttgatggatgtgattctttggctataagttgttccaaatgtgctagttcaaagcttgttctgtgaggctagcattttggtgcaactttatagccttagaatcacccatcagaattacctagaaactggaacaaaagtatgttattcatttcggcgagttgtatgcataagttcaggtcttagttggatatctatatattgtaggagttatatgttaaatgttaattggaaaccaaataaaatgttatctattccattgtatcagcaaatagttaattatattaagacgatgatatcaacgggggaatgggatgtaggtagtaaactgccaacacaaagagagctgtcaagaatatttgaagtaaatagaagtactgttgtggaggctttagatgaattaaaagcagacggcctaattgaaggtaaaagcggtgtaggaactgtcatagttaataatacatggtctctaatcacatctatttcaccattaaaatggcaaaattatattttaagtggcatacaaaagcctaatctgcccacaattcaaaaaataaatcaattagagtttaaagatggaatgatacggttaggaacaggagagctttctcgtgatttatatccttatgatatgatgaaagtgattttaaacaaagtttcagaaaatgtaaaagatttaggttatgaggaaccaaaagggtcattacatttaagagaaacaataagtaagtatctgaaaaagcataacataaatgtttccccatcaaaaatattaattgtatccggatcattgcaagcactgcagttaatttctatgggaattttaaagagtggatctacaatacttgttgaaaagccttcatatttgagttcacttaatttatttcaatcatatggaatgaatttaaatagtgtttcaatggataactttggcatcaagccaaatgaaattataaaaaataagaaaaatgataattcaactttattatatactatacccacttttcaaaatcctacaggaattgtaatgaccgaagagagaagaaatgaaattttagaaatatgctcaaaagaaagaattcctattattgaagatgatgcatatagagaactatggttagataaagagccaccgccaccgttaaaatcaaaagataaaaatggaaatgtcatgtatttaggcactgcttcaaaatctatagcagcaggtcttagagttggttggttagttggaccagaaaatgtaattgaacatttaagtgatcttaagatgcagatggattatggaacaagttctttatctcaggaagtcttagctgaattgattgatagtggcttatatgatgaatatttactacagctaagaaatcagctaaaaattcgaagagatgctacactaaatattttaaagaggtattttgatggcatagcaacatggagcaaaccaaatggtggattttatatttggctaaaattaaaaaaatcattatcattaaacaaactatttgaattatcttatgagaaaggaatattgattaatccgggaaacatttatgatttttctaatagtcaaaacttaagaatttcatattcatatgcatcattggaagagttagaaaaggggttaaggatattatcagaattagtaaaaaagagctatttcaatgatataagtaaaagcagctattgattttttcaatggctgcttttggttgggtaataaactaatatattggttggggactttttatattttattagttaaaataataaaagaactaataaaggggggatattatgattaaatacttattacaaggatttctatttggacttgcttatgtagcaccaataggaacacaaaacttatatgtaataaacactgctatgcaaaaaagtaaggctgaaacatataaagttgcacttataactatcttatttgatatttcactagcgatttcgtgcttttttggaataggggcgcttattcaaaaatactatctattaaaattggcaatacttctatttggatttatagttataatttacataggagttggattaataagatcatcttcacaaatattagaagatagaaagcttggtaataattcattaattaaaattattatttcttgttttgccgttacgtggcttaatcctcaggcaataattgatggatccttattattaggtggatttaatgcctcacttccagcagagatgtcaaagtactttatagtgggggtatgcatggcatcagccatatggtttagtagtcttgcaggattcgtaggaaagtttagcagtaaatttaataaaataattaaatggattaacatagtttgtggactagtacttatattctatggcttaaaattaggatactcatttattgaagcaatatatttatagcttttttgtggctatagataacctaagtgagacttaaacttatgcatacaactcgccgaaataaggattatgctgttgctccagtttctaaggaaattatgatggatgattctaagattacaagttgcgcccaagatgctagcctcaaaggcgagctttgaactagcatacttggaacaacttttaatctaagaatcaaaaccatcaaattcctaatgaaacatttcgcaaaagcataattcttatttctagtttggatatatttcatggtgtagatctaacttatagttgggttatctataaggttcttcattgaaaaattgaaatatctctggtagagaaatttgataaatatttgtgaaattttcatagtcatatagaacagatatatattcaataaaatagacttattagatgaatatttttacaaagttgctaagacttaaagtcatatcttcactagaaatcataaatatatttgtgaagaaaacatttgaaaatgagctgttaaaggttcttagctgtaggttgttccattttagcttgtcaaactgaaagttggagcatgctaaagtggatacaacctgctgcttagaaccttcagcgatattttcatagcttttcggaatcaaaatatttatgatttcggcgagctatacacataagtatggattatagctgatatatctatatacaaaaatgtatttgttggatacaataaaggtgaaattacttacttaatgaggagattcatgatatgaaatattattttgcaccattagaaggtgttactggatatgtatataggaatgcatatgaaactttttttggacaaattgataagtactttatgccatttatatcaccaactaagaataaaagctttacttctagagagctaaacgatgtactgcctgagcataatgaaggaatcaatgttattcctcagatacttactaataattctgagtatttcattgatactgtaaatcagttgggtaaatttggaaataatgaagttaatttaaatttaggatgtccatctggcactgttgttgcaaagcataagggatcaggatttcttgcacaaagaaagcagcttgatgaatttttagaagatatcttttcaaatgcatcaaccaaaatttccataaagacaagaataggaaaggattcgccagatgaattctatgagttaattgaaatctttaataagtatcctttagaggagcttataattcatccgagaattcagacagacttttataaaaataagccgaatatggaagtgtttaaggatgcattagcattaagtaaaaatcccgtttgttataatggtgatatttttaatatagaagattataagaaattgtcagaagcttatccgaagcttgaaacagtaatgcttggtagaggacttattgcaaatccgggcttgattgaagaaattaagaccaatcgtgttatggataaagagttaatgaagtcatttcatgataaagtctgcacaggatatgaagaagttctttcaggtgatagaaatgtcttatttaaaatgaaggaattgtggttttatatgatacatatgttttctaatagtgataaatatgctaagaagataagaaagactaatagtttgcaggaatataagggaatcatatcgagcatgtttcaggaacttgacataaagaaaacggatatacatggattttaatggttaaattatctcatagattaagatagtttttaatgcctaaatttttatataaatgaagtttatgcttaactaatgtttattatagaaaataaaatgtaaaatggttacaaatagcgtattgctatcaaggtgcattaggggaaataatatatattggaaaaataacttttcattataattctaaaagtattgcaagaattttagcattaattgcgcattgtaaattatggattgcgaattgaacattgaaaattgtgaaatgtgaattgaaaatatatatttataaaatttggaatataatcactgatatttttataatttattgtatcagggggtgattatatgggcgttaaagaaataattgagaaatacaggggtaaaaatgcagatatgcaaaacattatcgcaaaccttgttctcgcagtggcagatttaaatgccaaaaacaaaatcttagtggatatactaaagaagaatgaaatagagattcatataactaataagaaatatcaaaaatatttaagtgattcgctggagagtatattatcgaagatttacaaagactagccaaagaagattttataaatggaggatatagaatgatatttaaacctgaattaattaagggaatagcgaaaacaagccatccatatggatgtagaaaagaagtactaaaccaaatcgaatactgtaagaatgcaaagcaatttcatggccctaaaaaagtgcttattattggagcatcatcaggttttggccttgctacaagaatttctttagcctttggtggagcgaaagctgatacaattggagtttcgtttgaaacaggaattacagataggagaacagggactgcaggttggtataataatatattttttaaagagtttgcagaaaaagaaggacttattgcaaaaaactttattggagatgcattttcagatgaagtaaaagaaaatgttataaaatatataaagaatgagtttggaaaaattgatttactcatttatagtttagcatcgccaagaagaaaagatcctaagacaggtaatatatacgattcaactttaaaaactacatctggagaatttcagggtccgacaattgatatggagacagatgaacttgttacgactaaagttaattcagcaactgataaagagatagaagcaacaaaaaaagtaatgggaggtgaagattggagcgagtggtgtaagctacttcttgaaaatgattgcctctctgataaggctataacaatttcgtattcatatattggagcatcaagaacatataaaatttatagggaaggtacaataggagaggctaaacgccatcttgaaaatactgcaattcaaatagacaaagagtggcaaaagaagattaatggaaaggcttttgtttctgtaaataaagcaattgtaactaaggcaagtgcatatataccttctttctcattgtatgcagcggtattatataaagtaatgaaagaaaagaatttacatgaaaactgcattatgcagatgcaaagaatgtttgctgataaaatatatgcagaaaatctacttgaatttgatgatagtggaagattaagaatggatgattgggaacttagggaagatgtacaaagtgaagttaatgaattgtgggaaaaaataactccagataattttaaaatattatcggattatgacggatataaaaaggaatttatgcagttaaatggttttgaaattgatggagtcaattatagtgaagacattgatatagaagcattaaaaaggctagaaccatagattaattaatgtttatgttaagaagtatcaaaagggtacttcttatttttttataaatatattttagagagataataatatttcaaaaaacattgcacctgtggtataattatccgggtatgcaataaatcaaatagctatgtatattatggtcgtatttgattttagtgttaataaatataattaactagggagaagtgttttgaaatgagaataaaatataaacttatcgttagctatttgatcttaattgtatttgctgtaagtgtattggggttgttaattgggaataaatctaataaagcagtttttaaagaggtaaacgaaaaaagtcaacgtttaacagaatcaattattacaactttgagtgtaagaaatgatttgcttacggagaaatcttatggagatttaaattttgcaaataacgtattaaacaatttagctgatatgagagttgattacaatgaaatcgtaaaagttggagattttaacttaccagttttatattcaggaaatcaaagaatatccttagataatactatagttgataaactaaaacaatcaacaggtactatagcaacaatgtttttattacaagatgataaactaataagggtttctactaccgtatttaataatggtaatagaatattaggtacatatatttcaagtgatactgaagcttataaaaagacactaaataatgaagaatatattggcgatattagaatagaaggaattggatatttaacaagaatgaagccaatattggataaagataaaaaagtaataggggcaatagggttaggaaataaaattagtaatgattatttagacaagacattaagcaatatcaaattaggaaagactggatatgcgtacatactagattctgaaggaaatgtaattcttcatccatctgatagtgggaaaaatgtaagtgattatgattttgttcaaaaaatgcataatgaaaaaagtggaatgattgagtatacttataacggagttaaaaaggtaggatattatcagtattttgaagcttggcattggtatgtggttactacagcagattatgaggaattaaactcttcagcaaaatcaattttgaccaccacaatagctaccgggggaataattattattttgggaggaattatagcattatttttagctaatacattagttaagcctattaataagttaaaatcctgtatggagatagcgagtaaaggcgatttgacaatacgatgtaatatagatagtaaagatgagataggagttttagcaaatagttttaataatatgcttgcagaaaataaaagattattagaagaaactgtgcagtatgaaaagttaaaaacagaatttatcgctaatatgtcacatgaattaaggacaccattaaatattatattttcaacagcgcagttgtttaatgtacttataaatagagatgagaatttaaatactgagaaaatgaagaattatacaaatagtataaagcaaaactgttataggttggtaagattggtgaataatcttatagatataacaaagattgattcaggttatatgaaactagaattgaaaaatggcaatatagtacaagttgtagaggatataacacaatcaaccgctgaatatgtagagtatatgtctagaacaataatatttgatacagataatgaagaaaaaattatggcttttgacgaggaaaagctagaaagaattttgctcaatctgatttctaatgctactaaattcactgaaccaggagataaaataagtgttgatttatatgatatggatgatcatatagttatatctgtaaaagatacaggaagaggaattccagaggaaaaagtatcgcagcttttccaacgatttaagcaggtagagcgattattaaatagaagtcatgaaggaagtggaattgggttatccatagttaaagctttagttgagatgcatgaaggaacaatagaagtaaaaagtatttatggagaaggtacagagtttatcatatgtcttcctgttaagatcgtaccagaagatgaaggtaagaaaagcaagaatggttatgcaaaccaatctaaggttgaaaatattaatattgagttttcagatatatatagctaagcaagatggtaaatttttattgacatttttaagctttgagtataaaatttagacgagcactaggggagccgtaatggctgagatgagtttttcagaccctttgaacctgcactgggtaatgccagcgaagggaagttataagataatataaagctaaatctaaaggtagtagatttacaatttaattagattattaactcttttcaatggtattttagtactgtttgggaggagtttttttatgcaattttcacaaagattattattgaaaggtaaacctatttgggaagcatgcttggagcatccttttcttaaggaacttagtgagggaactttaaaagaagataagttttgcttttatgttaagcaggattatgtttatctaatagattatataaagcttttcgcattaggtatggttaaagcagattcattagaagatatacaagcctttgctaaatgtgcaaatgctatagtaaatattgaaatggatgcacatactgaatatgctaagaagtttggaataactagagaagaactagaggccacaaagccaaatgcaagtaatttgtcgtacacaaagtttatgctgcaggtatcatcagaaggatctttagctgaactagtagcagcgctacttccatgcatgtggagctatgcatttattggaaaaaccttggcaaagaatagtaaggcattagagcatccactttacagtgaatggatacttacatatgcaacagaagaatataacaaggaaaatgattggtgcataaaacttatggataaactagcagaagggcttacagaaagacaacttcaaaaattagaagaaattttcattatatcttcaaaatatgaatatatgttttgggatgggtgctacaaaaaggaaagttgggttatttagatgaaagcattggaaattaataatttatcctttggatataaggattctggaaaattaatagtagatgatttatcttttgatataaataaaaatgaatttgtcacaattattgcacctagtggcacaggcaaaagtaccctttttcgattaattttaggactattaaagccacaaaagggtaatataaatatattaaaagatggtaataaaaatattataggatatatgcctcaaaaagattctttaatgccttggagaaatattcttgacaatacagcagttggacttgaattaaatggttatagtaagaaagaagctagaaaagtggcagctacatactttgagggttttggacttaaaggaactgaaaaatattatccacatgaattatcaggtggtatgaggcagagagcttcatttttaagagcaatagtaaataacccttccataattttattggatgagccattttcttctctagatgcgttaacaagaagaaagatgcagtcatggcttttagatctttgtcaaagacaaagtaatactgtgtttatgataactcatgatatagaggaagctttgcttttatcagatagaattcttatttgtacggagcttccatatagaaacctaaaatctatagatgtaaatattgaaagaccaaggaattatgagaccacactttctagtgagtttattgagttaaaaagatctattttaaatgttcttgactccttagaagaaaataagggggggggtatagaatgaaaaaaattaaagactatatatttcctttaatatttttgataattataattttggcctgggaatttataataccatattttaaggtgccgaattttattttgcctagattttctgaaataataaaggctttagtagatcaaaaagatttaatatataaacattctcttatcacactaggtgaagcactattagggcttattgcgtccgtaattataggtatatcttgtgcactttccatatacctttggagaaatgtttcgaaaactttatatccaattataattttttctcaaacaattccgactatagctttatctccaattatggttatgtggtttggatataccatatggtcaaaggtagcagtagtaatattattttgttttttccctatagttataagtacattagatggattaaatagtgtagatagagatttagaggatgttttaaaagctcttggaggaaatagatttcaaatattttttaaactccatatgaattccgtattacctaattttttgagcagttttaaaatagctgcaacctacagtatttcaggggctaccattggagaatggctaggtgctgaaaagggattaggtatatatattaagagagcagcaggaatgcttcaggcagattctgttttcgcaggagtgttagttttatcatttctaggattaattctattttccgtaggattcttgctagaaaagattttattaaaatacagaagaggattgaaggaggacaatcatgaaattaaaaaagcttagtatatttttactatttattatgttagttagtttagtatttagcgggtgctctagtgcttccaataataaggaagacaagagtgctaccaaagaacttaaagaaattaatgttcttttagactggtatccaaatgcagtacattcattcttatatgcagcagaagagcaaggatactttaaagaagcaggattaaaggttaacttaattacacctgcaggtacagatgatggaattaaattagtagcagcaggaaaagctgatttagcaataagctatcctaaacaaattatcttagcaagaggcgaaaatattcctattaaatccgttggagcgatagttagaagttcattaaatcaactaatggttcgtaaagattcaggagttaaaacattaaaggatttagaaggaaagaaagttggatatgcatcttttgatattgataaagagactgttaaagcaatggtagcacaagctggtggagatccatcaaaggttgaatttgtagatgttggatatgacttaatgcctggaatcgaaacaaaacaagttgatgcaattataggtggatatataaaccatgaaaaaatattattagagaaaaaaggtattgaattagaaacttttgcgccatcagattttggcgtgccaaataactacgaattagcatttgttgcaagcgatgacgcaattaagaataataatgatacaatacaagcgttcttaggagctgctaaaaaaggatttgaatatactcaaaagaatcctgataaggctttagatttaatattgaaggctcaaaatgaaagtttcccattagatgaagagacagaaaagaagagcttagagatacttttacctcttatggaaaatgaaagtggtaaattcttaagtcaagataaagagaattggaataacaacattaaatggctaaaagataagaatttacttcaagctgatgtagatagtaaagatgtgtttcaataatttatctttgatataggagatagtatagataaactatacttatgcgtatacctcaccgaaatgaataatatacttttgttccagtttctaggcaattatgatgggtgattctaaggctataaagttgcacccaaagtgctagcctcaaagaacaagctttgaactagcatatttggaacaacttatagccaaagaatcacatccatcaaaattaccaatgaaacattccacaaaagtatatcactcatttctggttggaagatattgcacagtctaagtatagtctatgattatgttattcatatttagataaaagctgagaaattattttaaaaaagatactgaatttattgtaattcggtatcttttttttattctttatgaaattataatgcaattaaatctgtggataacttttatattagtatattttactagggttaattactataaaagaataaaaaaaataaatcatattctcctgcataaaatgttcttgaatgcagcagagctgcgattttgttattttacttaaaattatactttataaactaattggatttagatattaggagtgagaaatttctggtttttgaagttttttattttaattaattgacaaaatatatttagagatatataatttatttcgaaagcgaaatattcgtacgcgaaatgtttgaaagcgaaatataaaaggggttggaattatatggagattattaatgaaagtatagaggtatcaagattatttcaagaagtaatgagtttatttagagcaaatatgaaaaaaataattgagcggactggaatgacagctccacagggcatggttattggactcttatataaaaataagaaaatgaaagtgactgaattaagtaagcagctacatttgcctaatagtacagtatcaggtattattgataaacttgaagaacaagatgctgttataagagaaagaagtgaagatgataagagagttgtctatgtaagtatatctccaaagtttattgaaattcataagaattttaataaacaaattgaacataatattgagagtatactaaatcaaggaacacaagaagagcttaataagatttctgagggactaataatattcaaaagacttttaagtgaaaataacgctaattaaggagagtgcgctaatgattaaattgtttagatttttaaaacagtacacagttaatataataataattgttttattagtttttacacaagtaattgcaaacttatatctgcctacattaatggctgatatagttgataaaggaattgttcaaaaagatgtggttcagactatatcatttttaggttataacggtgaatatagtggagttgattatattctaagaataggaggattaatgctgcttgtatctcttggaggtgcaatttgttcaattatatcatcatttttatcttcaagaactgcaataggctttgctaaaataattcgtaataaattattcacaaaagttgaaagtttttctttaaatgaatttgataaatttggaacagctactttaataacaagaactacaaatgatgttacacaggttcaatcagttacaataatgatgttttcaattgcacttttcgcaccattgacagctttaggcggagttgttatggctttaagagagaatgtaactctaacatggatctttgcggtagtaattccactacttgcagttataatagggcttactttaaaatttgcaatgcctttatttaaattgatgcaagttaaaatagataaattaaacttggtattacgtgaaggtcttacaggaataagagtagttcgtgctttcaaccgtataaatactgaaaaggttagatttgacgacgcaaataaagatttaatgaataatgctataaaagtaaataaaattatggcaattttaatgccaataatgatgtttatcatgaatgctactactgtagcagtaatttggtttggaagtataagaatagattcagggaatatggaagttggatctttaatagcctttatgcaatatggaatgcagattttatttggtttcttaatgcttggtatggtatttataatgattccaagagctcaagcatcagcagttagaataaatgaagtactagatatggaatctgaaattgtagatcctaagaagccattattaaatgaaaatgaaggcggttatgttgaatttaatgatgtaagctttagctatccaggtgcagaacaagaagctattagcaatatatcatttagtgcgaaacctggagaagtaacagctataattggtggtactggttcaggaaaatcaacattaattaatatgataccacgtttttatgatgttacaagtggttcagttcttgttgatggcattgatgtaagggaaatgagtcaggaaagtataagagctaaaataggttttgtacctcaaaaaactgtgcttttttctggaactattgctgagaatataaaatatggtaaagacgatgctagtatggaagaaattaaacatgctgcagaagtagctcaagcaacagatttcataaatggaatggatgatggatatgagcatttaattgcccaaggaggaactaacgtatcaggaggacaaaagcaacgtttatcaatagcacgtgctcttgttagaaagccggagatatacatctttgatgatagtttttcagctcttgattttaaaacagatgcaagacttcgtgcagcattaaaaaaggaaaccttaaaatcaactgtaattcttgtagctcaaagagttgcaactgttatggatgcagatagaattatagttttagatgaagggaaaattgcgggtattggaactcataaagagctattaaacagttgtaaggtatattctgagattgtatcatcacaactttcagaggaggaattatcatgagtgaaaatcgtaatagagtaaataaaagatcaggtggcggttttggcggtggtccaatgggatcttttgctggcccaaaagtaaaagcaaaggattttaaagggacattaaaaagacttttaaattatttgaaaccacaaagaatgaatttcattttagtgtttatatttgctatagcgagtactatatttaatatagtaggacctaaaatttcaggtaaagctataactagattagttgaaggattagtaggaaaatttactgtaatgtctcaaaatgctgcattacttaaagcaggaaaaccaggtaatataccagtaccggggattgattttcaatatataggagatattcttttattactacttggcttatatgtaatcagtacactttttggcttccttcaacaatatattatggcaggggttgctcaaaaaacagtatacaacctaagaaaagaagttgaagataaaatttcacgtttaccacttaaattctttgattcaagaactcatggtgaaattttaagtcgtgtgacaaatgatgttgataatatttcaacaacacttcaacaaagtttgactcagcttattacatctatagtaactattgttggagttattatcatgatgttaactataagtccaataatgacattagtagtaatattaacattaccactttatattgtaataacaacacttgttgctaagcattctcaaaagttttttgctgctcaacaaaaagaagtaggagaacttaatggtcacgtagaggaaatgtatacaggacataaaatagttaaggtttttggacatgaaaaagattcaataaaagagtttgaaaatattaatgatagactttacaaagctggatggaaagcacaatttatatcaggtataataatgccaatgatgagatttgttagtaatataggttatgtaatagtttgtgttgtaggtggatatttagctactttaggaaaaattagtattggtgatattcaagctttcattcaatattcaaatcagtttactcaaccaatagttcaaactgctaatattgctaatataattcaatcaacagttgcatctgcagaaagagtttttgaacttttagatgaagttgaggagattccagatgctactgatgctaagattatagaattccctaaaggtgaagttaaatttgataatgttgattttagctataaaccagaagaaccacttattgaagatatgaaccttgatgttaaaaaaggtcatacaattgcaattgtaggaccaactggagcaggtaaaactacactcgttaacttacttatgcgtttctacgaaataaattctggtaagataatgatcgatggtgtagatatcagagatataaaaagaggagcacttcataacatgtttggtatggttcttcaagatacatggttatttaacggaactataatggataacatagcttatggtagagaaggtgctactgaggaagaagttattcaggcagcaaaagcagcacatgctcatcactttattaaaactcttccagatggatataatacaatattaaacgaagaagcttctaatatatctcaaggccagaagcagcttcttacgatagctagagcaattctagcaaatcctactataatgattcttgatgaggctacaagtagtgttgactcaagaacagaagtttatatacaaaaagctatgacagaacttatgaaaggcagaacaagttttgttattgcacataggctttctacaattagggatgcagaattaattctagttatgaataagggaagtatcatagaaatgggtaaccataatgaacttcttgcaaagaaaggtttctatgcagatctttacaacagccaattctctggagcaaatttagatagtgaagtaatgtaaattataatattttaaggatagtagacgatagtaatattgtttactatcctttatttttatacaaggaaatggatttttgtaattctaaaaatgttgcaagaatttcagccataattgtgaatttcaacatatagatatcaaactttaaaactacatttatgtgataaattaccgaaataataaatattttgattccgaaaagctaagaacttttaacagctcattttcaaatattttctccatattatgacccatgtgattacaaatatatttattatttctagtgaagatataaacttaaaattttagcaactttgtaaatacattcatctaataggttgatttgatacctatatatacattaaaaataaattaaattactcatactaaaacaaaaagtggttgcatagaattattggcataattcttgctttaaatatgcttgaagaataaaaaatattggaggaattagaaatgagtaatttaggaactttcaacaaaataataaaatctgtttggagtattgaaaatttagatgaaattgaagacggttttggtccagacgaaattgaggcatgggattcacttagccatattgaactagtagtagcccttgaggaagaatttgaaatatctatggcagttcaagatatttcaaggttatatactataggagatatcaaaaatacattgagaaaatatggggttgaaatatgacctttactgactatgtttttgaattttcctcagggcttaataaaactgcaataattgataagaaaaatatcagctatagtgagttgcactgtaagatactgatgatatcccataatataaagaaaattaatatagtaaaggaagataagattctattgataagtgagaattcacctttttttatagaaagttactttggaataataagaagtgggtgcacttgtgtacccctaaatcctactttaagtaagaatgacattgaatatataattaatagctgcaatcctaaagcgatttttattgaaaaacgttttttagataatatgagaagtttgattaataaggacattaaaatagttactgaagaaacattaaatagtcttctattagataaagaatgcactaataatgtagaagaagaaattgattctaaaaatagtgtggcggtaatattatttacatctggttcaacagcaagaccaaaaggagtaatgcttacgcatcataatctctgtcataatactaattccataatagaatatttaagcttaaatagggaagataggatagaagttgtcttaccattttactattgctttgggacatcgttgttccatacacatttaagagttggcggtagcttagtaataaataataaattcatgttcccagaaacagttctagatgatattgaaaaatatgaatgtacaggttttgctggagttccaagtaattatcaaattttacttagaaaatctagtattaaagatagaaatttgaaaagtctaagatacgtggctcaagcaggaggaagactccctgatagttttattaaagaactaaaacaagctcttaagaacaatgcacaaatattcataatgtatggacaaactgaagcaactgcaagactttcgtatcttccacctaatatgcttgatgaaaaaatgggttcaataggtaaaggcattcctggaactttgcttaaagtaattgataaagaaggaaatgaagtgaaagttgatgaaataggtgaagtagtggcttttggtgaaaatataatgaagggttactttaacgatgaagaagaaacgaaaaaggtcattagaaatggttatttatatactggtgatttggctacagtggatgaagatggttatatttatattgtggcaagggaaaaacaaatcataaaaagtggtggaaatagaataagtcctaaagaaattgaaaatatcataattcaaattccaagtgttatagaagcagcagtaattggagttcaagacgatatattaggggaagcagtaaaagcatttgtagtactaaatgatgaagtttttaaagttgatgaaaagtatataattgaatattgcaaagataaattgccgtcttataaagtacctaaatatgtggtgcttttagatggacttccaaaaaattcttctggtaaagtaatgatgggggatctgaaatgatagatgaaattataaataatgagcaatttaagtgtctgcaaaaggataaagaaaaaaagcttttagatattcttaaacctcaaatagatgaaaatagaaaaaatgaaaatctgaacattatgtataaaaaactagaagttaatataaatgatataaattctcttgaagagattccatttattcctgtaaatatgtttaagcattttgagcttaggacttgtagtgaagaaagtgtagttagaatattaaactcaagttctacaactggaaaaattcctagcaagatatttattgataaggaaacatctataagacaatctcaaggattaatatcaactctaacaagttttttaggatcatatagaagaccaatgcttataattgatagtaaagaggttaacaaaaaaagtgactatttaactgcaagaggcgcggcaataagaggagtaagtagttttggaaagagtttaacttatgctatggatttggtagatgataacatcatacttaatatagaacgacttaaagaatttgaagaaaagtacaaagatacagatatattagtatatggatttacttatattatctggactaggtttgttaacgtactaaaagaaaaaaatataaaattaaacatgccgaaaattaaaatacttcatagtggaggctggaaaaaattaaatgcccaaaaagttgaaaagaaagagtttaatagatctgtggctgaagtatttggaactgaccctgaaaacataattgatttttatggaatggttgaacagttaggcgtagtttttcttgactgtgaattcggatataaacatgtacctgactttggagaaattattatacgagattttttaacgcttaaagaggtagaaataggtcaatgtggatttattgaagttatgagcgcccttacttcaagttatccgggccaggctatattaactgaagatataggtgaatttgtaggtatagatgattgtaaatgtggaagaaagggaaaatactttaagtttaaagatagagtagaaaaatctgaaacaagaggatgtggagatacttttgcagagaagagggataagaaatgataagctgctttatgttaggagataaattttatgaggaacccaagaagcttcaaagtttagatgcaattatagaagagcttaataaaaatagagaaacaatttattcgtatccatcagaagctatgattgaaataattaatgaatatagtaaaatattatgtagcgatagaaagtttttaagttatgaaggtgtaccatttttggtattatggctaaagaaagacaatattaagaagcttttacaccaagatctaaaaaaacaagaattcctagatgattttatagaaatagcagataataaatttatgaaagctcaacctagagggatggtttgtcattttatggctggcaatgttcctactcttccaatatattatttagttcaagccattatttgtagaaatgttaatttatgcaggatacctattggtagtatagatattgtaattgaacttctaaaacctttaaaagatattgtaattaattttagaggagaaaaatattatggaagtaccttattaaagagcatttcaattataaatttttcaagtaatgatttaaagttaaatactgaaatttcacaggtagcggatgtaagagtaatatgcggcggtgaagaagccgtgaaaacattgtcagttctgcctaagaaaaccacatgtaaggatgttatatttggacctaaatattcctttgctgtatttgaaaaatctgccatggaaagtcttaagataactaaaaccttcgataattttgcaaaggatataataagctttgatcaaagggcatgctcttctcctcaagtgttatttattgagaaatctactgtgggtattaatgaagcagcacaaatgcttgcacaagcattagaaaagagtttaaaacgatatcctaaggttgaaattaatcaaggagcagctgcaaatattattaataaaagaggggaatatcttatatctttagaaaaagatataatatgcagtaaagaccttaaatacacaattttaatagataaagaaataatattagaagagcctgtgcagcatacaactatatttttaaaagagattgaagatatatttgaggtttgcaagctaataacgccaaggatacaaactattggaatagcttctgaaaacaatagcaggattataaattttgcaaataaagctagcctgcatggtgttgataggctagttaaagtaggtctcatgaatttgtatgattcaccttgggatggaatactttttatgagtgaaatagttaaatggacaattttaaatttaaattaaaaaagagaaatgctttattaatggataaatctttagatttgttttataaacggtcctttgttactggtaaattataaatttttgtataaataagatatagggtgtggagaatgtgaaagtaaaagaattgatgacaaaaaaggtattggtgttaaaacctaataatacatttgaagaggcagcaaagctttttattgaaaatggcatagatggagcacccgttgtagatagagatggaaagttaattagcattgtaacaaaaacagatttaatgaaagctattcttaataaattagagatgaatacgaagctagaaactttagagcttaaaaaagtgataacaattaatagtgaaatgaatatagaagatgtattgaaatataatgttggtcgtcttccagttatagataaaaacaataagattatagggataattactcatacagattttattaatgatttggttgaaaaaatttcaaaaaaatgtagagatataaaaaatacaaagttagggttaacggagttagactctattattgagtgctcttatgatggaatttatataacagatggggaagctaatactataaaaataaataatgcctatgagagtattacaggacttaaaagagcagaggttttaggaagaaatatgaaagacctggaaaaagaaggcgttatatctcagtcggctactcttttagtgctaaagaatagaaaaaccactacaattcaacaggaattcaaaacaggagtaaaggttcttgtgagcagtaacccaatctttgataagaatggaaaaataattatggtggttacaaacgtacgagatgtaacacaactttatgagttaaaagagcaacttcaaaagaataaagaaattactcttaaatatgtttctgaaatcgaagaaatgagaactcaattattaaatacttcagaaattgttgcagaagatcataaaactattgaaattatccagcttgccaatagaattgctaaagtggacactacgattcttatgctcggagaaactggagcaggaaaggatcaaatagcaaagtatatacacaaagtaagcaagcgcagtaaaaagcaatttattaaagttaattgtggtgcggtgcctgcaagtttaatagaatctgaatttttcggctatgaaaaaggtgcttttactggagcaaataaagaaggtaaaataggtttatttgaaatggcttctggagggactattttcctcgatgaagttggagaacttccaatggatatgcaggttaagcttctaagagtgcttcaagagatggaagtagtacgaattggaggaacaaagcctataaaaattgatgttagagtactagctgcaacaaatagagatttggaagatatgataaagaaaaaacaatttagagaggatttgtattataggctcaatgtcataccgctatatattccaccccttagagaaagaaagcatgatattttgccattaatcaatttttttcttacacagcttaataaaaagtacaatttcaataagatatttgcttcagatgctttaaattgtatgtatgaatataattggcctgggaatgttagggagctaaaaaatattgttgagagagctgtaataatgagtgaggatgataagataaagaggtcagatcttcctaaaaatattattggctcaaatggcatgattgtaactttaaatacttttgaagaaggtataaatttaaaagaaaccttagatgccatagaaaagaaattaattaagaaggcatatgacaagtatggtaatgtcagagctgcagcaaaatcactaggaatagatgcatcaacctttgtaaggaagaggcagaaatatataaaagaagaaatttaataatgtgacgtatttaaatagaaattggatacatatttattcattagctacggcagcttattttaaaatgcctgctgtgcaaatatgtatccaatttctttgttgagtatggcgaataaatatataatctatttaaattcatgtatcatactataaacatgctaaatattggatagccagtggtgcaaaaatgcaacaagatgcagaagtgcaacgtaataaaatattttcaaattatagctattgtaaacgtattccgaggttgttatgaaatttaattgaaattttagttgcgtttttgcaacaaatatttatgttattccagaaattagaggtgatattaaaaaaattataagattattatggtaaattcaagttagtacggtaaatttttattttggcacgcttattgctttgtaatattattagaaaataaaaattagtgaaggaagcgataatatgccattaaaaacaaaggaacaatatattgaaagccttagaaagttaaacctaaaagtgtacatgtttggaaaaccagttgacaatgttgttgataatccaatcataagaccatctcttaattcagttgctatgacttatgaattagcacaaatgccagagtatgaagatttaatgacagctacttctaatttaacaggggaaaaagtaaatagatttgctcatttacatcaaagcacagatgatcttattaaaaaagtaaagatgcaaagattacttggtcaaaaaaccgcatcatgtttccaaaggtgcgttggtatggatgcttttaatgcattatacagttcaacatacgaaatagataaagcgtgtggaacaaattatcatgaaaactttaataagtttttaaaatatgttcaagaaaacgacttaaccgttgatggtgcaatgactgatcctaaaggggacagaggattatcgccaagtaaacaagctgatggagatttatacttaagggttgttgaaagaagagaagatggggtagttgttagaggagcaaaatgtcaccaaactggaatgttaaattctcatgaggtagtagtaatgccaacaatagcattaactccaaatgataaggattgggcaatatcttttgcagtgcctacagatgctgaaggaataattcatatatatggaaggcaatcttgtgatacaagaaaattggagccaggtgctgatatagatcttggaaatgctgaatttggtggacaagaaacattaacaatatttgataatgtatttgtaccaaatgaaagaattttcttaaatggagaaactgattttgctggaatgatagttgaaagatttgcaggatatcatagacaaagttatggtggatgcaaagtcggagttggagatgttctaattggagctgctgcagtagctgctgattataatggagctcacaaagcatctcatgttaaagataaattaatagaaatgactcacttaaatgaaactttattctcttgtggtattgcatgttcagcaatgggttctaaaacagaagctggaaattattatattgataatctgctagcaaatgtatgtaagcaaaatgttacaagattcccttatgaaatatgtagacttgcagaagatattgctggaggaatcatggtgactatgccatcagaagcagattttaaagatgaaaagataggtccatatatagataaatatttgagaggtgtaaactcagtttcaacagaaaatagaatgagaatattaagattaatagaaaatatttgtttagggactgcagctgtcggatatagaacagaatcaatgcatggagctggatcaccacaagctcaaagaattatgatagctagacaaggaaatttagcagctaaaaagaaaatagctaagaaaatagctagaattaaagaataatatgagcaaaatcatgatagatgaaattaataatgttatcaatactaaaataaaaccgttacttgccgagcataatggagatattgagcttgtagaagttaacaatggtgtagcttacgtaaaacttttaggcgcatgcagtggctgtccttctgcaaggtttactatggaagaattaatttcttgcgtattaaaagaaataccagaaataaaagatgtacaacttgttgatccaattagcagagaaatgcttgattttgctagacagctgcttagaaaataaaggccaggtgaaattttggaaataggtattagatactgtggtggctgtaatgccggttatgatagaaaaacgtttattacaaatttaattaacgatcttggaaaaactcataatttcgagattgcaaaggaaaataaggaatatgactatttaattttagtctgtggatgtccaaattgctgtgtaagccatgaaaaatatatatcaaaatatagtaaaatttttattaaaaatataggggattatgataaattagcatatgacttgaaaaaattgtaatccggttatatttaggaggtgtctaagattagctggaaagatttatacaagagtaaggtagttacagctgacgaagctgtaagaaaaattaaatcgaatgatagagtagtaactggacatgcttgcggagagccaaaagaaattatagatgcaatggttagaaacaaagatttatatgaaaacgtagaaattgttcatatggtatccatgggtaaaagtgaatattgcaagcctgaaatggctgttaattttcgccacaattctatattcgcaggtggaacaacaagggaagctatttttgacggaagagcagattttacaccatgctttttctcagaagtaccaaaaatgtttagggaaggtactttaccagtagatgtagcactcgttcaattaagtgttccagatgaacatggttattgtagttttggagtttcaaatgactacacaaaacctgctgcagaggccgctaaaattgttattgctgaattaaatgagaagatgccaagaactttaggagattcatttatacatgtttctgatatcgattatatagttgaaacttcaaatgatattattgagcttaagccacctaaaataggagaagttgaaaaggctattggtgaaaactgtgcaaagctaatagaagatggttctacacttcaattaggaattggtgcaattccagatgcagtactattattcttaaagggaaaaaaggatcttgggattcattcggaaatgatatctgatggagtagttgaattaatagaagcaggtgtaataactaataaagcaaaaactttacatcctggaaaatctgtagttacctttttaatgggtactaagaggctttatgattatgttaatggaaatccaagtgttgccatgtatcctgtagattatgtaaataatccatgtgttatagcagaaaattataagatggtctctataaactcatgtattcaggtagatcttatgggacaagttgcggctgatacaattggacttaaacagttcagtggtgtgggtggacaagttgactttgtaagaggagcagcaatggctaaaggcggtaaatcaataattgcaatgccgtcaactgcaagtaaaggaaaactttcaagaatagttccaattttagatgagggtgcaactgttacaacatctagaaacgatattcattatgttgtaactgagtttggaatagcagagctcaaagggaaaactttaaaagaaagagccaaagcattaataaatgtcgcacatcctgattttagagatgcccttattaaagagtgggaaaagaggtttaaagtgaaattttaaattaaaataaatgaaaatatgggaggaaataatttatgaaagtgtatgttttagatacgggatatttagaaactgataagaataatgtagttggtggggctactatgggaacatatagccaaccgcatgtacaaaataaatggattaagctacctgtaatgtctattttaattgatcatccagatggaaaaatattatatgatgtaggaagcaatccagaagctatgaatggttattggccaaaaaaccttcaagaagtttatccattatatcaaacaaaagaacaaagactagaaaatcaattggctttatgtgggacaaagccagaagaaataaagaaagtaataatttctcatatgcatttagatcatgcaggaaatttagatatgtttaaacatgcagatgtatatgtaccaaaggcggactttatgcaagctcaaactcaagtaaggttaaatgaaaatcctttaacacacggaggatatattaaagctgatatggatgtttcagtaaagcaatatcatttagttgaagaggattttgaatttgcaaagggcatagaaatagtaaatttaccaggtcatacaccaggattacttggaatagtagttcatttagaaaatgaaggcacattaatattcccacaagattgtgtttatagttcagaaatttatggtccaccagctaaggcatcaggattgctttatgatagtctttctttctttaaatcaattgaaaaagtaagagcgttagagaaaaaatatgacgcaaaagtattttttgctcatgatgaagaattctttaaaacaataaaacttgcccctgagttttatgaataaaaagtagtaaatagataaccacagtgaaagttatagtaatgtggtgactaaccgaaatcagaaacgttgttgtttcacaggactatgaaaattttgctgaaaggcagttaatgtagggttgtatccatatgtgcatgctcctaattttattaggacaagtaaacctggaacaaccctacattaattattttcatcagcttattttctaatgattgctccatattatgacattaaggttacaagcatatatggaatttctttgtttttatatgcatttaagtatagtaaatgtttaatagaattttgtatgtgatttactctattgtttagacaaaacaataaaaatactatgtaacataatatttaaatgctaaaatataagtaaagaataaaatataaaaataaaatacactatcagatataggtttgatatttttttgaatgtgtctggatatatggaggaaagaaatgagtaatattaataatgacaataatttaggaaacataaggaaagcaagaattgaagatttggaaaccatagtaaaatttaattacaatctggcaaaagaaacagaggataaagaacttaatttagaaattttaagcaatggtgttagagcgatgattgaagattcatcaaaaggacaatactatgcttgtgaagtgaatgatagagtagttggacaaattatgtttacatatgaatggagtgattggagaaatggtatgtttctttgggtgcaaagtgtatatgtagattctgagtatagaaaaaaaggtatttataagaagttgtatcataatgttaagaatatatgtgataataatgatggaatagctggcataagattgtatgtagaaaaagaaaatataaatgctaaagcaacatatgaatcacttgggatgagcgaatgtaattataatatgtatgaatatgaaaaataataatttgcattattaagataagtaatcatatatgactagattgctgcttaatagctgtaaacaatagttaagttagcggaaaactgcaattttcattaaagacagcttctataagttttgttcatatatagatgaacatattaacaaagttgcaaaactttaagttcatattttcactagaaatcataaatatattttcatagcttttcggaatcaaaatatttatgatttcggtaagttaccacctaaatttagttttagagttggatatctatatatgttgcaataataaatttacatttaaacttctagtatgttaagtgccatattaaggcaaaatgtagaaactaattgcaacatatataaatcatattttacaatagaagggaagtgagaattaaaggagagcgtattaaatcctctcttttaataatattatgaataataaaaagatagtaagagatggacatatgcactcgccatattgtcctcatggaactaaagatagttttgaaatgtatgttgataaagcattaatagagggattagaggaaataacatttactgaacacatgccttttccatgttattttatagatgacaaagaatttcaagatgaatgtgctccaaatgaagaagtaatagagaagtattttaaggatgttgaagaaataaaattaaaatataaagacaaaatcaaaataaatataggactagaagttgattttgttgatggatatgaagaaggaactaaaagactacttaattcatatggtcccaaattagaagatgggctaatttctgtacattttataaaaatgggcgatgaatatgtggctattgatggaaaagaaggctttgaaagagctttagagttttatggtaccactgaaaaagtttatgataagtattatgagactttgcttaaagcaataaaatcagacttaggggagtataagcctcatcgtgtagggcatccaaatttaattaggattttcaataaattatacccattagaatataaaaacaaagaacttttagaagaaatagtaagagaaatcaaatcaaggaattatgaagtagatgtaaatacagcaggccttagaaagccatattgtggtgaaatatatgtatcagatatttttaagcagttgatagatgagtacggggttaaaaaagtatacggatcagattctcacacagcaagtgatgttggaagagattttgataaagaataaatttcagatatcagcagtaagactcgcattaaggagtgaggtatgtcattagaaggtattaattttattaaagaaattacatcttttatctttgtggaagataagccagaatactgtgatattatttttatacctggtagtgcatggccagagccagcagaaaaagcttcaaaactttggttagagggatatgcaccatatatacttccatcaggaaaatatagcatgtcaaaaggatattttccaggaccaataactaaggctgaaatatacaatggagaatataacactgaatgggagtttatgagagatatagccatatcaaatggagttaatggtgatgcaatattaaaagaagataatgcaacttggacaaaggagaatgcctttaagtcaaaggaagttactgataactataatttagatataaaaaaggctataatatgttgcaaatcatttcatgccaagagatgtctcatgttttatagttatgcatatccaaagacaaaattctttgtatgtccaatagatgtagacggaataactaaagaaaattggttcaaaactgagagtggaattgataaggttatgggagaattatcacgttgtggaggacaacttaagaaagcagtttctacttggtcctaaatgttttaataattctaaaaatattacaagaattttagctgtgattgtgaattgcaacatatatatactctgaaaattaaacttagcagaatcaacattaaactataatgtaataagaaataaatgattttataaaaaaatgaatagcattgattataacgtatatattatagatcccataggtagctttatagcgacttatgggattatctatttttgaaagttttaatattttataaatctagtgaaaaaagtatacgattttgtaacaataatttaattactgaataaagtgactatatagattgttatatatttagtgttaaaataaagttaagatatatactttggattgacaatatatagatgatgttctatattatatatagatagatgtctatataggaaaggcgtgaatgagaatgagctatgaagaaaattcaaaaatttttaaagcattatctgatccaagcaggttgaaaataattgatatattatcttgtggtgaaagatgtgcatgcgatatactagaatactttgattttactcagccaaccctttcgcatcatatgaaggtgttaagtgactgtagtcttatagaagttagaaaagaaggtctttggaattactaccgattaaatcttaataattgcaataaacttacactgttcatgatgaatcttgtaactgaaacaaaagattgtatttgtaatgataagagtaaatgtacttgtaaataagaagataaaaactaaatgtatctgtaaatcaaatttaaatataaaaaattatgattgtaaaggagttaataaaaatgaaaaaaatgattatttttgatccagctatgtgttgttcaacaggtgtttgcgggccatctgtagataaagaattattgagagtttcaactgcacttaatactttaaaaaacaaaggtatagtagtggaaagacacaatttaacaagtaatcctcaaatatttgtagataataaagtgataaatgaaattttaaacaccaaaggaattgaagctttacctgtaactatggtagatggagtagtagttaaggaaggtagttatccaactaacgaagaattttgtattctattaggtataccagcagatactttgaagcttaatataaagaaagctagtataaaaaagcctgctaaaggctgtggatgtaaaggtggatgctgctaataattaggttcattagaataaatcgatacacttaagtagaagggaagagtaaattatgttgaaactgtttgatattgaaaagctgaacttaactaagtatctatttcttactggaaaaggtggagttggtaagacttcaacagcctgtgctgtagccgtgaatttagcggatcaaggaaagaagattatgcttgtaagtactgatccagcatcaaatcttcaagatgtatttaatacagagttaaataataaaggagttcaaataaaagaagttccaaacttaactgttgcaaattttgaaccagaagctgcggcagctgaatatagggaaagtgtaatagctccatatagaggaaagttaccacaagcagtaatagataatatggaagaacaattatcaggttcatgtactgttgaaattgcagcatttaatgagttctcagctatgataactgatgaaaaagtattcaatgaatatgatcatatcatttttgatactgcaccaacagggcataccttaagaatgttacaattaccttctgcatggagtgattttattaatgaaagcactcatggagcatcatgcttaggtcagcttgcaggacttgaagaaaagaaagagatgtacaaaagtgcagtagatactttagctgatggagagaaaacaacacttatattagtatctcgtcctgaaacttctccactaaaagaggcagaaagagcttctggtgaacttcaagaaattggtgtagacaatcaaatattaattataaatggtgtgcttcaaagtcatgatgatgaactttcaaacgctatttatgaaaaacagcaaaaagctttaagtaatatgccacctaaatttaaggatatcgaaacttttgaaattccactaagaccttataatataacagggcttgaaaacgtaagagctttccttaaaaaagattatattaaaattagtgaggaatctttaaatgcagtggctatgccaaaattaaaagatgtcattgaggatctatataatagcagcaaaaaagttatttttacaatgggtaaaggcggagtaggtaagacaactatagcagcatctatagcactaggacttgctaaaaaaggtaagaaggttcacttaaccactactgatccggctgctcacttaaaatttgtattagatgaaagctatggaatttctttgagcaatattgacgaaaaagaagaactcgaaaagtacagacaagaagttataggtaaggcaagagaaaacaatatgactgatgaagatatcgaatatattgaagaagatttaagatcaccttgtactcaagaaatagcagtatttagagcttttgctgaaattgttgaaagatcagaaaatgaagttgtagtaatagatacagctccaacaggtcatacgttacttcttttagattcaacagaaagttataataaagaaatttctaggtcagaaggagatataccagagtcagtaataaagttattgcctagattaagaaatgaaagtgaaactgaagttgttatagtaactttagctgaaacaactcctgtttatgaagccatgagacttcaaaaggatttagatagggctcagattcatagcaaatggtggataatcaattcaagtctttatgcaactgatactactaatgaaatcttaaaagttaaagcaagtaatgaaattcagtggattaacaaagttgatgaaatttctagtggaaattttgcagtaatagagtggaaagcagaagacgtaagaggaaataacttaaataacttaattaaatagacatatttaaggagagataaaaaagatgaaaacaaaagttgcatttatatgtgtgcacaattcatgcagatcacaaatggcagaggcactaggaaaactttatggaaataatatttttgaaagttattcagcaggaacagaaacaaaacctcaaataaatcaagatgcagtgagaatcataaaagatttatacaacattgatatgaatgaaacacaaaaatccaagctcttaagtgatattccagaggtggatattttggtaacaatgggctgtaatgttaaatgtccatttttaccatctaagcatatagaagattggggcttagatgatccaagtggaaaaagtgatgatgaatttataaaaacagctaaaacaatagaagaaaaggtaaaagaattagccagaagaattgagaataatgaaattaaattagaatagtaaattaaaaataggggggattttaaaattgagtaataaatcatcaagattatcattcttagatagatatttgactctttggatatttgcagccatggcgctaggaatattgttaggatggggagtaccagcactatcagagggactcgcgagtttatctattggaacaacttcaataccaatagctataggccttattgttatgatgtatccaccacttgctaaagtaaattataaggaattaggaaaggtatttaaaaatccaaaggttcttggtttatcactagtacaaaattggtttattgggccaattttgatgttcatacttgcttttgtatttttaaaatctgattcggaattaatgacaggacttattcttataggacttgcaagatgtatagctatggtaattctttggaacagcttagcagatggagatagtgagtatgcggctgcattagttgcatttaattcaatattccaagtagtattttattctgtatttgcatactttttcataactgtactcccacctatttttggacttacaggatatgagattcatatttccatgggacaagtggcaacgtctgttgcaatttatcttggtattccttttttattaggaatgtttactagacttatactagaacctatgaagggaacagaatggtatgtaaaaaaatttatttctaaaattagtccattagctctaatagccttattgtttacaattgtagttatgttcatgtttaaaggaaaatatattgtagaattacctttagatgttatcaaagtagctataccacttgtaatatatttcatagtaatgttttctgtatcattttacattagttataagtcaggcatagattatcataagactactactttatcttttacagctgcaagcaataactttgaacttgcaatagcagttgcagtagcagtatttggaattcaatcaagggttgcttttgcagcagtaatagggccgttaatagaagttccagtaatgataggactagtaaatgtagcacttcactggggaagaaaatatttttcatattctaaatagaaatgatattgctagttacagttaataaaaatatatagagcttgttgtgaaatatatagagtcattaatttataaaatttgcatataaatcaatagttgtaaggctataatagtataaattgtgctattatagctttatatttatatgtggaatctattgtatattcgaaagtgttttatgtaatttaagaaaggagttttaaaaatattatgaaatattcttatgaggaaggtaattttagaaaaggagatatactagggattactattgacagaaaggtaaatatttatttattagatggtaataattttattaggtatagaaataataatagttttaaatactatggtggtccagttgatagctcaccatataatattacagttccaagttctggtcactggtatattgtgatagatttaggcggaggatcaggaattctaaactactctataaaagtatttagataaaatacatatgtattagttaatatgttatttaactatagatgtccaaattattaattatacttattatgtgaacatatttactatatataaagggttatcttatctagaaatcataaatatatttgtggagaaaacatttgaaaatgagctgtcaagattcttagttgtagattgttccactttagcttgtcacactgaaagcgggagcatgctaaagtggtgaaatctgcagcttagaattttcagcgatattttcatagcttttcggaacaaaatatttatgatttcggcaagttaccgcataaatatagttttaaagtcggatatctatatattaataggcattatttagcgtacatttatatataaatttacattaaattttggtagtattttgaaataagtaaatagattttgttttgcattgacaataataggataaatatattattatatacaaaatatctaaaatgtaaaaggagtaagataaaatggcatattattttaatgaaccatcccatacttttggagaatatttattagtaccaggttactcttctgtagactgcataccacaaaatgtaagtttgaaaacacctcttgttaagtttaaaaaaggcgaagaatcatcattaagcattaatatacctttagtttcggctataatgcagtcagtgtcagatgataaaatggcagtagctttagcaaaagaaggcggagtttcattcgtatatggatctcagtcaattgaaaatgaagctgctatggttgcaagagttaagaactataagtcaggatttgttactagtgattctaacatcaaacctgatactactttagaggaagttgtagaaataaaagagagaacaggacattctactatggcagttactgaagatgggactccaaatggaaaacttcttggaattgtaacaagtagagactatagaataactagaatggatttaagtactaaggtttcggaatttatgacacctttcagtgaacttatatatgcggattctaatataagtttgaaagaagcaaataacattatttgggataataaattaaatatgctgccattagttgataaagatcaaaagttaaaatacatggtattccgtaaagattattcagctaataaggaaaattcaaatgaacttattgattctcaaaaaagatacatagtaggagcaggtattaatactagagattatgctgaaagagtaccagcattaatagaggctggagcagatgtattatgtattgattcatctgagggattttcagaatggcaaagaataacaattgattatatacataagaattttggagaaaacataaaagtcggagctggaaatgttgttgatagagatggatttatgtttttagcagaagctggagccgactttgttaaagttggaataggcggtggatctatctgcataactcgtgagcaaaagggtataggcagagggcaggcaacgtctcttattgatgtagttaaagctagagatgaatattttgaaaagacaggagtttatattcctgtatgctctgatggcggtattgttcatgactatcatattaccttggcattggctatgggtgcagattttattatgttaggaagatatttctcaagatttgatgaaagtccaactaataaagtaaatataaacggaaactacatgaaggagtattggggcgaaggttcaaatagggcaagaaattggcaaagatatgaccttggtggagataagaaattatcttttgaggaaggtgttgattcatatgttccatatgccggaagtctaaaagataatgtaagtataacacttaataaagttcgttctacaatgtgtaactgtggtgctcttactattccagaacttcaaaagaatgcaaaaataacattagtgtctgcaacaagtatcgtagaaggaagttctcatgatgtaatgttaaaagataatcactataatgctcaacagtaaagagaatatactatgaggcaatttcaaacttacaagatgcagttcaactgtttcgcaaggaattatagagagtttgcaaattaaagtatgaaattactcatagttaatattaaatttttaaataataaaaaattaaaattgacattatttaatccatgtcatattatatagtatatagatttcattggaaggaagtatttttgtgagtgtttagtatcttaattatagtaatttaatattaattcaaaaaagaagtattttatacttttatttgttgttgaattaattataactattaaaagatacgagccacgaatttgctttcaaaagataggtatatttctatctttatttgatgttgaattttttagctgtggaggtatccacagcttttttgtttatttaaaaacttaaactatatatgtattgcaattgtttttacgcattttgtatgcaagaatttacttatcctaaaaacatactaagtgtaattttattattgcaatatagataaatatttgatgaatgtatacattgcattaaatattagttcgctaagtagctctattttgaaatctataaccttgttcgtggcttgaatatataagaaaaggaaatgaaaaaatgaataatgccacattagaaaaattaaattataaagaattaaaagaaattgtaaaatcatattgcgtaagtaacttaggaaaaaagttaattgataaattagttccaagtaataatataaaacaagtaagaagaatgattaaagaaacttccgaagggagaaggctaatcgatgcatcttaccatatgccccttgaaggagtttttgatatatctccattaattgaaaaaatagaaaaaggtggggttttggagccatcagaagtgattacagtaggagattttctcagaggatgcagaaaagtaaaagcgttcattaaagataaagaaggatatgcagaaacattaagtgcatatggagaaaatattacagatttaaaatatattgaagatgaaataaatatggctattagaggaaccattgttgattctaatgctacaaaagaacttaaaaaaattcgtaggagcattgagctttgtgaagaaaaaataaaagaaaagatagagaaattcattaagaatcaaagcaataaagagtatatgcaagaattttttgttagtataagaaatggaagatatacggttcctataaaagctgcttataaaaatcatgtacaagggactatagttgaagcttcttcaaaaggcactacagtgtttatggaaccagcttcagtctcaaaatatacaactgaattaatagctttaaaggctgaagagagtgttgaagaatacaaaatattatctaccttaagtgaaatgatttttcaaaagcatcaagaaataaaaataaatatcgaagttatttcagagtatgacatgatacttgcaaaagcaaaatatagcaaggaaataagcggaattgagccaaagctcaatgattatggctatatagaaatagtaaagggaaaatatccattaattaaagagtgcgttccactggattttgaaataggaaataaatatagaagcttaataataactggtccaaatgcaggcggaaagacagttgtattgaaaagtgttggattactaactttagcagcattaagtggatttcatataagtgcacatgaaaatactgaaattgcagtatttgatgatatttttgttgatattggtgataatcaaagtgtagaaaatgctttaagtacattttcttctcatgtaaaaaatttagcagagattttaaaagaaagcagtaaaaattcattattgctttttgatgaaattggaagtggtactgagccaaatgaaggagcagcacttgctattgcaattttagaagaattttatcataaggggtgcattacagtagcaagtactcattatggggaaattaaaaacttttcgcaaaatcatccagacttcgaaaatgcagctatggaatttaaaagagatactttggagccattatataaacttcatataggaaaaagtggagacagtaatgccctatatatatcaagaaaaatgggtattagtgataatataattgaaagaagtagaaaatatattcaaacgaaagattataattataatttagtaaaagaaagtaaaattcctaaaagagaaatagaaaaatccgaaactcatgagtatatttatagagttggagataaagtattactgcttgataaagatgcaagtggaattgtctataaagaaattgatagattaaataatataactgttttgtttaataatgaatttatagaagtaaattacagaaggcttaaacttgaaattagtgctgaagaattatatcctaaagattatgatatgagtcatctattttcaagctataaagaaagaaaacttaatagagatattgaaagaggatctaaaaaaggactcaaaaaatttagaaaacaggaaggtatatagatatctaacgttaaaacttagatttattcgatgactcaacgaaatcaaatacatttttattccacagagctatgaaaaatttcgctgaaagcactaaataggagcttgtatccacattagcttgctcccgtttataacgtgacaagctgatgaggaacaagcttcaattaagtgcttttggcagcgagattttcaaatgcctatttcataaaaatgtatttaatttctagtatagcggtatattctaactgtaagttgagctcttaaattgtctatctataaagttaaaaagaaaagaatataagaatttaggaataaaggaatttaagaattaaagaatataagaatttaaaagtgaaaatatttttaaagaaaaaaatgtaaaaagttaacaatttataattttttcaatgctttgaataattatatatagtgtaaaaataattcttcgttataattctaaaaatattgaaagaattttaactgtaattgtgaattgtgaaacttgcattgtgaattgcagcatatatattaaaaaaggttatcttatgaaggtgtataaaccaatgagatgacctctttttataaaaagcacgataatgtattaattctttctaattcaggaaacatgtatcaagtaagcctttttattggtaaataataatgctataatatgaacagattattacgcatgtcataggtgataattttactgttactgaatgaattggaggaaacatatgaaggaaaacttggaagttacattaaagcaaatgattcatatcattcatagagctattaattctgtggacaaaagacttttgaatcatggagaaaaagttgcatatataatgttaaatttattaaaagcaagaggaaattatagtaatgaagatatgcttaaaatttgcgtcatatcaatttttcacgatattggtgcatataaggttgcggaaagagataagcttgttgatattgatgtaaaaactccgtttgatcatgctatctatggttcattatttataaaatatttttctccgttacctaatttatataatatagttctaagccatcattttacgtgtaagtattttaaggacaagcacatggatattctatctaaagaaggaatgatattaagttttgccgattatattgatagggtatatttatcaaaaaaagaattaacgaaagattttattagaaatcatgcagaagaatattcaaatgaatatatagaattattgatggaagcagatagaaaatttaattttatcgaaaagttaatagataaaacttatgttgatgagttgtatgatttttttggtactagaatacttacaagagatgaagttgtatcgtatagtaaaatgttagcttattcaattgattttagaagtgaagcaacagttaaacacaccatattagtagaagccgtaagttttcaaattgcaaagttgtgtgggttagatgagaaaattttatcaaaaattaaaatagcagctgcacttcatgatataggaaagattgctattccagtagaaatcttagaaaagcccggtaaacttacagacgaagagtttgaaattatgaaaagccatgctattataggatatgagattttaagtgatttaaatatagatgatataagagatataggaacatttcaccatgagaagttagatggtgcgggctatccgtttggactaaaaggagatcaattaactaaagaaatgagaatagtagcaataggggatattactagcgctttattaggagtaaggagttataaagaggaatttagtaaagataggataataaaaattctaaataatatggctaaggataataaaattgatttacatatcactaatttgcttatagataattatgattttataattgatgaggcaaaaaagcaggctagtgatttaatggcaaaatatctaaatataacgactgaatataaacaattattaaaaaaattctcgtaaaaataagtgaatatcatataatcccaagcaattaattatatgtgctatataactaattgcttgggatttttagttgaaaagttattttttataggatttccaaatttctttagaaattctttcgatttaattgtaaactatctttatttttcaattgtatattttagttgtagctaatcagtatataaaaaataaatatgttgtatttgaggttatacattttgtattaatttaacgtttggattactaggagtttaaatgcaagtacattattgcagcaatatcatctaagaataggaggtgcttatggtagaatctttaattctataatttacaatcaaatttaataaaataaatttagtaggaaagtatatttatgagtttggaaatgcctcacatatgatatataataaattttatgtgaattttattccaaattaaataagaataggaattttagtatgtattctaagattaattaaatatatattgtaaaaataattcttcatgacaattctaaaaatattgcaagaattttagtcgtaattatgaattgtgaaatgtgtattgtgaattgcaacatatatatgaattaattatcatttgtaaattatagtaagtgagggtgttaaagaataatgaatttttataatgttttaatagttgaagatgaaaaagaaatatgtgatggaatagagatatacttgaaaaaccagggctacaatgtttatagagcaagcaatggaatagaaggattggagataatagaaaatcaaactttgcatttggcaatagttgacataatgatgccgaagatggatggaataacaatggtgatgaaactccgtgagaattatgattttcctgtaataatgcttactgcaaaatcagaggagatggataaaattctaggccttaatattggagcggatgactatgtaactaagccatttaatccaatggagttgatagctagagtcaattcccagcttagaagatattcaaaatatttaagtgttgtaagtggagctgaacaaaaaagtaatatattttcaattggtggtctagagttaaacaatgatacaaaagaagtgattcttgatggagaattaataaaagttacaccaatagaatttaaaatattacaattgttaatgaaaaatccaggaagagttttttcagcagaagaaatatatgaaaaagtgtggaatgaggaagccataaatactgatacagtaatggttcacgttaggaatataagagaaaaaatagagattgatacaaagaatccaaaatatttaaaggtggtatggggagttggatacaaaattgaaaaacagtaaaaaatcatatgttacaaatttagtagcatttacaatacttataataatgtctatggggatttttaatttttacccaaagataaaggaatggtcgaagggagaaccttcacctccgtatgaagactatgaattgatgagaactatgtatcaaagtaattatgttttatataaagatcttttggggcaaacaagtcaagaagaattaagtgctgataaaatttatataaaatcatatgagaaaaattcaaataataatgaaggtttaaatcacaatgaagaattagataatggcttagatgtagctagatattttaataatattttagattcatggaaagatgatctaaataataactacaaaaatttaaattatttggtttatcctaatgatatgtctataaagaaaactaatactgataatgatttaagcttactagaagatgaaactaaaagtcaagatttaaataataaatatgctttttacatagtagtaaagtatgatgaaaatggagtggctactgtaaataaggtttatggctctgattattatgtaataagaaatagttttttagattttacaatgaaaaaagtttggaatgatgactatatcgttaagaacgatataaaatttaatcctattaaaaacgtgacttttatttatggaattcctaaggacttaaaatatttcgatagaataagctcaattgtagatagttcacaaaataaaatatataacagagctgtagcaactgttgttttatcaatattaggtattgtgctaatattggcgttattagtgccttataggatgggaagaaatgtatttggaattaaatatttcgaaaagataccattcgagatcaactgttttatttttggtattggaggaattggttctggggtcgtacttgtatctattattattgaaactttaaagaatacacttattaaaccgggaatggataaggcattggaaagttttgctataattatgatgaatgcaattatatggagtataaccatttatgctattttcgcagtgactatgctcttaaagttcataattaatacaggagtaattaaatatcttaaggaaaaattactaattataaaaatagtaaattcctcgaaaaggtggtttaataatttatttaattatatagggcatatagatttaaatgataaatccaataagttcattataaaagttattggcgtaaatttgataataatgttaatctgctgtattttctggttttttggaatagtaatagcattaatttataatatgatattatttcattcaattagaaaacagtatggagatataaggaataagtttagtatacttttaaatgaagcagatagaattgctggtggtaatttagaagtagaaatagaggataatttagggttattcaatccactaaaagataaaattgaaaaaataaaagatggtttgaaaaaagctgtaagtgaagaagttaaaagtcagagaatgaaaactgaacttatttcaaatgtttcccatgatttaaaaacaccacttacttcaataataacttatactgatttattaaaaaaagataatttaactgaagaagaaagaaaatcttatattgatacaattgataaaaagtcacaaagattaaaatttctgattgaagacttgtttgaagtaagtaaggctactagtggagacattaagttaaacttagtgaatgtagatattgtagaattaatgagacagacgcaaattgaattagatgataaaataaaagattcaaagttaatattaaaaaatagttaccctgcaagtaaagtgatattaaatcttgatagccaaaaaacctttagaatttttgaaaatctaataataaatgtagtcaaatatgctatgaagggatcaagagtatatgtagacataatagatcatgagaagaatatagagattacaataaaaaatatgtcagcagaagagttgaattttgatccatttgatattgtagatagatttcaaagaggagataaatcaaggaatacagaaggatctggtcttggtcttgcaattgcaaagagttttgtggaagtccaaggtggaacttttaatattgaagtcgacggtgatttatttaaagtaattattatatttaagaaatagatttataataaagttcttgattaacttactcatcattaaatagtacttttatatatttatgttataatattataaatagttttagttaatggaggagataacatgtttactaaggaagagctattagtaattgaagatgctttgaaaattgcagatgctgaatatatcaagttaattgatgaaaacaagaataacaaaaatagaatggttgcatttaatagaaagcaaaagaaattatggttagtccaaaataaattaaaaaagcttatagaagaaagctaaaaataagagtagattcattatttatattttataaagatggatctacttttttataaataaacattgcacaataatactacatataataagtttgccaaaaaaaagcctgcatattataatatgtaggtatgcaattgttgtaaaatacttaattagaagttataaagaggagaaaaatatatgaataaattatttcaaattaaagatttagagttttatgaagaggattttgttgatgatataaaagattatgaagacataattgatattattgatgagttaagtgaaaatttaagttatgagattatagagattgcaggttccaatggatgttgtgataagacaaagaaaaattatctagttgagataattggatatattgatgaaaatgatgagtttattactaaagaggagagagacgctttaggagttatggatctaaataagagatttgatttatttgttataacagtacataagtgtacagcatgtaataagtgggtaatttctatattagaataattataggataattagctgttgatacagctttttcttttataaaatgaattaatgtataagaagggatgtaaaacaattggggaagcatagaaatactcaaagatttaaaattggtttaatgctaatttcacttatagtacagctatttgtcaatataaatatttttaatattaaagttaatgctgctgaaataaatagtaatttagatgaaatatatatatctgaatctaattacaatgaagatatgaaaggtaaagtcgaaccatatataaaaagtaaactggaatctggatatatagatggagataaggacgttaaattgtactatgaaaaatacaatatagaaaatgcaaaggctaatatagtaatatctcatggatatactgagagtttagagaagtatcatgaattaatatactattttttaaaggaagggtataatgttttcggaattgaacatagaggccatggtagatctggtacacttggaatagccgataaaacccaagtaaatgtagaaaaattcgatcaatatgtaactgattttaaaaaatttatggatgaagttgttatgccaaataatcaaggtaaaaaggtattattgtttgctcattcaatggggggaactattggaacaaaattcatagaggattacccagattattttgatgctgcggtattaagtgctcccatgtttgaagttaacactggaaatataccaaaatttctagctgatattatagtagaatttgaagttgctattggtaatggtggaaattacgttttaggtaagaaagcatatacaccagagtataaggaaaatgagattgggacaagttctttgaatcgttataaatatagtcatgatatagtagctaataacaaagaacttcaaagaggtggtgctagctataattggacaaaagaagcctttgatacaacgaaggaaattataaaaccagaaaatgcatcgaaagtagaaattccaatattattatttcaagctgataatgacacttatgtaaaggcagaaggacaaaataaattcgcaagtagcgcaaagaattgcgaaatagaaaagatagaaaactctagacatgaaatatatttagaaaaagatgaaattcaaaaaccgtatttaaatgaattactagatttttatgataaagtataattttttaaacaaaatatagaagcttgtctttgtgtataaagacaagcttctattcataatatactattccatcattgctgctaattttttattaaataataagaataatattcccattataattgaagtagcagctattccagcgaatatttgtaagtgtcctaaagtttctgtataaccagcaagtcttcctgctatttgattagcaacaaagctgcttagaagccatacacccattaggaaagatgcaagtttagctggcgccaattgacttaccattgaaagcccaactggtgataagcaaagttcaccaacagtatggaagaaataagttcctacaagccatatcatgttagctttaatagcagtgtcttctatatttcctcctctttgcataacagcacctaccataagtaagaaaccaagtcctaatagtattgaacctgttgccatcttttgaggaatacttaaatcaccactcttgctgcaagctaatttgtaccatagctttgatataggtattccaagtattaatataaacaatggatttagtgattggaaccaagatactggcacttcccatccaccaactgacctatctataaaatcttgtgtgtatatagtaagtgaacttccagcttgttcaaagcctgtccagaatattatagcaaaagctgttaatattaaaataactgcagttctatgtttttcttttgtagttaatggtttagcctttgctttattatcattggaattagatttagctacacctacaggtgctttaccaatatctccaaggaatttgtttgctaatccattaaagattacttgtcctaaaatcattccaagtcctgcaactaagaaaccatatctaaatccgtagtgtataatctcaccagcttgtgtagtagccattgttttttctgctaaagtaccacatataagaggtgctaaaaatgatccggcatttattcccatgtagaaaatagtgaaagctgaatcttttcttttatcgccatcagcatataaatgaccaaccattgttgaaatatttggtttaaagaaaccattcccgattataagtaaaaataaacctatgtacaatgtagtcatactttggtttgagaataatgttaactgtccaagagctattattattcctccaatggtgatagcttttctttgtcctaagtatctatctgagatatatccgcctgctagtggtgtaagatatacaagagatgtgaaatttgcatatatagtcattgcagataccttatctacaccaagtccacctcttataaattctgtagttaaatacattacaagcaatgctctcataccatagtaactaaatctttcccacatttctgtaaaaaataacatatacagacctggtgggtgtttcattttgcttgatccgtttgatgaaacttctttcatcattatatcgctgtcttttttaagttccataataaacctctttctttgatattttattaacataacaattttagcaacaaattcgacaacttgcaaatttttggttataaaaatgttaaattataacctgtaatagtggtatttatatgaaaaattaaatattctatataaaaaatttaataatagaatccctaaaaacagttgttgaattagcaatatattaaaaaatgatagcttttcataaaaaaatcatattttttgatattaattaaaaaatatgatttttttatgtatttttaaaatttgtttactaagtttttataagaaattattgtacatagtatgtttattcttgggacagtatatatttatacgattaaaaaggtggtgaaatataattgataagaaaaattagtaattttataatatgtttttttattatttttagcattcctatagattcaaaggcatcagaagatagggattaccaaacagagatgaagcaggatattttgattcttatgttatcatatcctcaacatatagtagatgtagaaaagaaaagtgatgatgaagtttacataattatgaaatcaggtaagaaaattatttatgatgataaaaaggaaaaaaatcatgaagtaaaattaacaaatcctgatttacaagatatgttagagcaagactacccattagaaagaaatacagagatcatggataaaaattttgatcctggtagagctagacattacgagttattaagcgaagtatatggaaattctaagggagcaattgaaaaaaacttagctagcttaaagtatggatatactaattatcaattcaataagcaaaataatgctaatgcgtctttagaagcagctttaaaagaattaatgcctttagcaaaatcaagatcagatataggtagtatactttaccctgccagcggaacatttaattatagagtcatatctggaactggaaggctaagcccacattcatatggaatcgcaattgatcttaaaagtgataagagagattattggaagtggagttcagaaaaggctggaaaggaaagactctctgattaccctaaagaactagtggaagcatttgaaaagaataatttcgtgtggggaggaaaatggggacattttgatatattgcattttgaatatagaccagaaataatattaaaagctagatattttgctaattggaataacaatgaggaatggttccaaggtgttcctctaaacgaagaaactaataagtatattgaaataattaacaataaattgtaacagaatgacttaatttagaaaggggtattatagatgcgactctctaaaatcaaaaaaaacaggtcaaaatttataatcatcttagtattcattgtgtttttatcattgattactagtgataaaagtagcattgtatttgctgatactagtactgataatgaagtgaaaagtattgtagaaaatatattttcaataaaaaataaagctatacttagcaaagatttggattcaattaaagccttatatgctactgatactagatatggtcaatgggcatatgagtatgaggaaaaaaaggttaagtatgttaataactgggctgaaaagcagggaatacaatttgtggatataattcctaaagtggtaatcaaaaaatgtaaaattggagataataaatgctcttttagtttaatttgtaatacagagtataagtacatatatccggatcagccggaagctataaatagctcaaggatggggacctatcattcttttcaattaagcaagagagataataattggataataacaaaggaatggtatacagatccatttgctgattccttaagtttagaaaatattaaagcggatgagattaaacaatatatatcatcacagcctcctagagatatttcaaatatcaatgaaaaaagaaaaggagcaaaggaatatgcagaaaggtactgtggagcggcaactattgaggaatatggctttaagtataataataaatatagagattttaatccagaaggtggagattgtgcaaattttgcgtcacaaatactacgcgaaggaggaaaattcaaggaaaattctacatggaactatgacaaaggaagtgcaacaggtccttgggtaaatgccggtaagttcactcattatatgattaatagcggaagagcagcggtaattgctagaggaagttatgaaaaggtatataaggcttcttataaattacttccaggagatttcatagcatacgaaaagaaaggtgatataacccatgtatcgacagttacaggagttgattctaaaggatattctttagtaacatgtcataatacggatagaaataatgttccatgggatttaggatggagtgataaaaaaattaagttttggcttattagagttcattactaaataaaatttgccttaaggggtaattaaatgcactttaaggcgtttatttaattataatagttttatataatcaaattattatagtataatacaaatcagatattaatcattaagggggggactagtaagaaatatagttgtattcttactaaagtagaatgaaacaagtattattaaataaaaaagataaaagtgttgtacaagctcaattaaaactattggatgtaagctatattgataaaattatgaaattacaagatgatgtatatgcaagattggataataaagaattttttgcatgttcagataaaaaagaatttgaaactgctataaatgaaaaaggtatagttttgggttgtgtttcattagatgaagatgagctaattgctataggagcatatattgaatatggatacgacgatcataattatggacatgatataaaaattcaaggggaagaacttcttaaggtgggacagattgaatcaactatggttttggatgattatagaggaaataaacttcaaaagataatatgcgaatctcttgaagaaataagcaaaacagcaggaatgaattgtatttgtgcaacagtttttcctgataataaatatagtttgaatacatttaaaaaacttgggtataatgttatggaagataaattaaaatatggtggattaagaagatttgttttaatgaaagaattaaaataataaactctaagcactggaaaagcttagtttattttaaaatatattttaagaaaattattcataaaaaagtataatttgaaaattcattaacaaatttttaaaaaaagtattgatttataaattattttgcaatataatgaattccataaagcaaatgtgcttataattaataaagaaattaatttttgagaaattaaaatttatatatgcaatgatgaagaaaagtaaattcaaatagatgatttttagagagcagatgatggtggaatatctgtatgagtcttgaattgaaagaacacttcggagctattaaccgaaattttatattaaaatagtaggcttaatcgggtccataccgttaaaagtggagagtataaaacaataatgttttgtacttcattgaggtgagttttttataaactaactagggtggtaccgcgagttaatctcgtccctgtgcataatgcatagggacgagatttttttgttaataaattttagttaaaataaaaatatttatttttacaaaatatctataaaaatcttatgtaaaaataatcaatatatgggaaaaggagcaataatcatgaaaagaatatttattaaagatttagcagttaatggagaagaaacagtattacttaaaggttgggttcataaaattcgtgatctttcacatgtttcgtttatcttacttagagataagtctgggataattcaattagtatgtactaaggaacaaattaaaggtttaagacttgaaaatgcagtagaagtaactggaatagttcgcgaaaatgaaaaggctccaaagggtatggaaattgaagtgtcagatattaagatagcaggaactgtatattatgataaattaccatttgaaattcaaagctttaaagaaaaggctgctcttgaaactcaattggattatagaacaataagtcttagaattcctaagaaaaaagcaattttcaaggttcaaaatgaaattgaagaagcatttagaatgttcttcaagggtaatgattttgaagaaatccatactccaaagataactcattctggaactgaaggtggatctgaaatgtttactgttaactacttcaacagaagagctttccttgcacaaagtcctcaattctggaaacaaatgatggttggagcaggttttgaaagagtatttgaagtaggttatgcatatagagcagaacttcacaatacttggagacatttaaatgagtatgtgagtttagatgttgaaatgggctttataaaagatgaaactgatcttatggaaatggaagaaaactttataagatatttatataaacacttaaatgaaaaatgtgctgaggaattgaaattatttgatgtggttcttcctgaagaaattaatattccaagaatcccacttgctaaagctcaagaaattttattagcagaatttaataaaaaatctccagttggaaatattgataacgaaggagaagcattattccataaatatgttaaagaaaaatataatagtgactatgtattcctaacagaatatccaacagctaagagaccaatgtatgcaatggaatgtgaagaaaacagagaaatgacaaagagtttcgacttgatcttcaaaggcgttgaaattacaactggtggtcaaagaatacatgattatgaaatgttaaaagctaaaatggaaagattaggattaaagcttgaagactttgctttctatttagatacatttaaatatggaatgccacctcacggagggtttgcaataggtttagaaagaattacaatgcaaatattaaaccttggaaatataagagaagcatcattatttccaagagacatgaagagattaacaccataagtgagaatccaaattttatattttggtattcgaacttactcagcgaacgtagtgagtcgagtttcattttaaaaaaaagttattcaatagaaacctgaaaaagcttctattgaataaagctaattagtttatgtaaagttaatgaattttaacatagtgctttaaaacagcattataaatgataaaaaatttgatgaggtgaaattaatgaaagttagtattgatgaagtaaaatatatagcaaagctttctaaattaagattttctgatgaagaagctgctaaatttgcaaaagaatttgaaaatattttagagcattttcaatatttaaatgaattagatttagatattaaagaagatatagataataaggcagaattaaagccagtagtaagaaaagatgaagttaagcaattcgaatgtaaggatttatttagaaatgttaaagatatgcaagagacttatattaaagtaccaaagattattgaatagggtggtgactagataatgcaaatgaatattaaagaaatggtagaaaaaattaaaagtagagaattaactagtgaagcactagttcaatcatatattgaagaaattacaaaaaacgagtcaactataaatgcatttttaacacttacttgtgaggaagcgttagcaaaagctaaagaaatagatgctaaagtaaaagccggtgaatctctaggaagacttgcaggtattccaatagcaataaaggataatatttgtacagaaggagtaaacactacttgtgcatcaaaaatgcttgaagattttattccaccatatgatgcaactgtaataaaaaaattattagctgaagatgcaataattattggtaagacaaatatggatgaatttgcaatgggatcttcaaatgagaactcagcatttaaaaagactttaaatccaagggatacaactagagttccaggaggatcatcaggtggatcagcagcagcagttgcagcaaaattcgcaccagtgtcgttaggatctgatacaggtggatctataagacagccagcagcattttgcggtgttgtaggattaaaacctacatatggattagtttctagatttggacttattgcttttggttcatcattagatcaaattggaccattttctaattcagtagaagacagtgcctatattttaaatataatttctggaactgatgaatatgattctacaagtataagagatttaaaagaaatagattatactgctagtcttcaagatggaattaagggaatgaaaatcggtgtccctgaagaattctttggtgaaggtttagatgaagaaattaaggaatcagtaaaaaatagtttggaaaaattaaaagaattaggagcagaagttgaaacattttctcttcctataattaaagacggattagcagcttattatataatgtcatctgctgaagcaagtactaatttagatagatatgatggaataagatatggttacaaaactccaaattacacaaatctagatgaattagttgaaaacagtagaactgaaggttttggagcagaagttaagagaagaataatgcttggaacatatgcacttgcttctggatattatgatgcttattataagaaagcagatgcttttagaagaaaattaagatatgatcttaaaaagacttttgaaaaatatgacttaatagtaggaccagtttcacctgtattaccttttaaaattggtgaaaaaaaggctgatccattatcaatgtacttagctgacatttacactattaatgttaatttagctggaaatccagcaatatcaattccagcaggaaagagcaaagaaggcttaccaattggaattcaattgatgggtgatatgttatgcgaagaaaaaatattcaaagctgcatatagcttagagcaagctttagctattgaattataggaggggaattacgatgaattttgaaacagtaataggacttgaaatacatgcagaattaaaatcgaagacaaaaattttctgctcttgttcaactaaatttggagcagaacctaatgctaatacatgtccaatatgcacaggggtacctggaacacttccagttcttaacgaagaagttgtaaatttagcaataaaagcaggtactgcactaggatgtacaataaataaatataacaaaatggatagaaaaaattatttttatcctgatcttccaaagaattatcaaacttcacaatttgatatgccaatatgttcaggtgggcttgtagaatttgaacatgaaggaaaggaagtaaaagttagactaaatagaattcatatagaagaagatgcaggaaagcttgttcacgtagaaggagaaccaatttctttagtagactataacagagttggcgttcctctagcagaaatagttacagaacctgatttaaggagtgttagtgaagctgttgcctttatgaaaaagcttaaatcaattttagagtatggtgaaatttctgattgtcgtatggaacaagggtctcttagatgtgatgctaacatttcattaagaccagttggacaaaaagaatttggacttagggtagagcttaagaacatcaactcttttagagagcttcaaaaagctttagaaaaagaagagagaagacaaagagagctttacacttatggagaaggtcataagatagttcaagaaactagaagatgggatgctgcaaagggtaaaacaataccaatgagatctaaagaagaagcagatgattatagatacgtagtagaaccagatttaccaccaataataatctatgatgaacaaattgaaacaataactaaatctttacctgaaatgccagatgaaaagaaagaaagatttttaactgcatatgaactttcagaaaaagaagtagatattttaattggagataaaggccttgctactttctttgaaaaagttgtagagttaggggctacacctaaaattgcttctaactggatattgggagatattttaagaatattaaatgatagaaaaatagaatctgaagatatgcacattgaagcagaaaactttgcgaaacttcttaaagtggttgaagaaggcaaaattagcaataatgtaggaagagaagttcttgatgaaattttcgatgaaaacaaagatccaatgaaggtcattgaagaaaaaggacttatgcaaattagttcatcagatgaactagaaaaaatagttgcggaagtaattgcaaataatcctcaatcagttgaagacttcaaagctggtaagacacaaagtgctggattcttaatggggcaagtaatgaaattgtcaaaaggtaaagcaaatcctaaggtagctaaggaattagtagataagaaacttagcgaaatttaagaaatggattgaaaaggagagcatgcattttatatgcagaagctctccttttcattttagctgatttatgaattaaataattgtgcattttgctttgttttagtggaataaatatttacaaaaaataatattatatattaacttatatgttaaatactcaagctccattatattttaataaagggaggaaattatggggaatatcataaacaaatttgaaaatgaaactaagacaagggtaaacgtgatagatcttgagaatttagggaaatctcaattgcaaaaagtggttattaaagatggaatttttgaagaaacagattttttaaaaagtgacaactatattagctttccaacagaaatgctgtgttcatctacaaaaagcagttttattaatgtttatttatgcttgaaaaatgaacttagcatggttgaaaaacttaaggatgagattataaaatcactatacgaggcgtatctaattcttgataaagataattgtgtagaaaacgataattttagtgaagaaggttttaagaaagctttttataattctttaaacaatgaaattaataatgtttccttaattaaattttatgaagtaaataatatacaaaatgtgtttaaagatatcaattttaatgaattgcttattgaattagggaaaataaattcttctgatgactctgataattttgaagagaaagatgagcatatatggaagagttattttgaagatttcaaagatgagtttcataaacattatagcaaatggttgaaaatgatttcaaaatactatgagcataatgaagaggggcatgaatatgcaaatgaagctcaagattatattaataagtttttaaatagagatttccgaaatttgtgtaatgttatttacggaacaaatacttcctgtgatcttatggttgaaagagcatatattaaacttcctgctagcaaagcgagatacttaggaataatatttattgattgtcctaaaggtgaaaatatagcaaagacaatagaaaatcgtgttggcgaggattataaagaattatttatggttatatctaaatgtagtaataatttagaacatcttttggaattgaaagaaaatataaatgctactacgttaaagaagagaatattttatgtcttaaacgagtttgaatcatataaaaatcattcatttgaaaacgacttattagattctaattccagagaagatttaatagatacattgaaatatgctacagctaaaaaattaggaatcaaagaagataaagttattgtaacagagcaatttaaagatataaacaaaagaacattagataaattggacacacacaatgattttgtacaattattaagactaattagaaaagaaagcgaaagattaggaaatcctataaagataaaatcatcaaataaggacggattaattagtatttctttgaatcaagagagaatgatagtgcaagctcttatgggaatgctttatgaaagatataatggatatctagtcgatcagtggaagagaatcattggtgatgaaaatgaaaaaatcgataggaagtgtaaaaaatatacttacagtgagattaatacaataataagaaatcgcaaagataattataaagaatataaagttacaaaatgtttaactacaagaaaagataataaaccaattgattttagtatgaggagtggcgattatacggatagcaaaagaatattaaaaatgatggttgattatggttatcaaacagttgggtttaatcctaatgaaaataaaattttagtaagtgttaatggcgaaatctctaaagaagataaagaaaaattaataaaatctattaaaggaaggctcgaagaaaacgctataaattattttgaaagtgcatttctagcaaatatatcaagaaaaaaatttaatacaaataatttatacaaggccttggaaattgaaacaaatataactatggatgatttttatagtgcatttaaagagatgttcaaaaaaattagtgataatatagttagatatgaagttcgacttcaatgaaagatagaaatgcagataaatgctaggtaatatatattgcagaaataatttttcatcataattctaaaaacagcacaagaattttagctgcaattgtgaattgtgaaatgtgcattgtgcattgcagaatatatattaaattggtttgataaattttaattttatttagcgattaggttatagattatatataaaaacttcagtattatgaaatcatcttaaactgaagtttttttatttacacttaaaattataattaatttatgtggactatatttttgctatattgcataatttaaaataatatgaatttggtaaatgaatacaacaatgcatattattagtttgacaaaatatgtaaatcatatataattatgatataaaggtttaaggggatgataacgtgataaaaaactgttggaaaaaagccgtagctttatcaatgatcgccacatcaataatgctattgaacccagtaggggcaaacgcatcatggaagcaagataatattggatggtggtatagtgaaggaaatctatgggctactggttggagaaaagttgatggaaattggtattatttctatcaaaatggatatatggctaaagatacgcaaataaatggttatagaatatattcaaatggagttgcagcaagcaatcctagcggaaaatatgaagattcaaattcttataaatggaaaattgaaaatggagaaaacaagaatatatctaataattactattatatagagaatgataaagttattggtaaaatgataaataaaaataactatttgtactatacagaaaatggacagaattttactggatggaagcaattgggtagtgccaaaggttttaactggtattacatggagaacggaaaacgctgtttaggatggaaaagcattaatggaaattggttctacttttctaattttgatggagaatcagatactgatgtcgaaaatctaagagggaaaatggttaatacttctattttggatgcaggcaagagttatcaatttgatgattatggagctttacaaagtacagttacaagatgataataacattttatgtattggtgatattgagtatttctaagtgcttaaataatattgttcagtacaaaaaaagaatgacttagttagggaaataagtcattcttttattattatttaaggggataaataataatgctttaactactttacaagtttaattgtatattattaatgttacatgattgtgtcaaatttattaacttaatataaacaaaataaatatttaaatttttagcactgatatgcagacacccaactctaaaactaaatttatgtggtaacttccgaaatcataaatattttgttctaaaaagctatgaaaatatatttatgatttctagtgaagatatggactcaaagttttagcaacttggcgaatatgttcatctaataagtctaattattaaattgtttatctatacaaaaaagtagaccgtttactataagaaaagaagaactaaaaaataaagtttaatagtcattaaaaatatttatataggaataaagttggattgatagatttttgttgcgttagttttctgaatttattcaaaaaatgattataaaaaagaacgacttatcaaggaaataagccgctctaaaattagagagtattgaagtagattcgtacaattaaagtataaaatgcatggagttttttatcaaaataaatcgtattacaatcaatgacatgaaaatactacatatcctatgttaaatcttaaaacgacacgaaaaaataaatttataccgagatattgtagaaaaagataaaaatacacataaaaaagtaatacaaaaataagtgaagatattgttgaaagatagtaaaataaggatgggtataaaattaatgattatgagagggatgagtaatcatcaaaaaagggctaagatcctcattcttaggcccttttttgatatttaacaatgtgcttgtccagattttgagaaatacggataactattttatttctaggagaaagaatacaaagcatattatttaggagacattttcttaaacgtatattatatcttaacttaaataattcaaatctattcatgatagtacctctttttactaatttatacacataaaataaattataatctacataaaataaattttcaaaaaaaatcatactacaaataatgtcaaaatattgtataaatatacatgcattttattcagataaaatgattagtttaatttagttagatgatatataaagagatattaaattactagaaaatataaaattgtatattaatatgcatattatttaaatttaaaacttatgaaggatatttttatgaccttgatagatatatagatataatttaaagaatattagcattgaaaaactgatgaaacagatgttaaaatgtatagatgaattaaaaaagaaagtattcacttgtgaggaaataattcgaactaaaaatcactaaaagatatatagtaatttattggaggtaattatcatgaacattcatgaaattttgtttggttcaagaccaaaatctattttgaaaataataaaagaaggggatttggaggaacttaaaaattttataacaaatggcggagatattaatgaaaaatataatgatactagcctgcttcattttgctatagataattgtgagaaaaattactttgacataatacaatttctagtaaacaatggtgctgatataaatagtaatcaaagttatttgaaagaactaccattacatagaatctgtgcgagagtaagtcctaagatggacgtcattaaattactgttagagaagggatctaaagtaaatactgaaaatatatcaggaaaaactcctatcttttattgtaactttaattattcggtagagcttttaaatcttcttattaaatatggtgcagatattaaacatagagataagtatagcaatactattttgcatgatgactatttaacttgtcgtgatactgataagtttcaagaatacttaaacgaagtagtttctcttggactagatataaattcaaagaataatttaggtcacacaccactatatctgtgtaaaaataaatctattgaaaatatattgatggaacatggagcaaagagaagtgtataattaagtgcttagatactatagagtggttaaacttagttatataattttagaatcttttttatgataatattactaccgagtataatttataattgtggttaacatattactgcagaataaaattatgattaaggaggtagattcaaatgtcattaaataatagcggagtgcataaaaattcactatctagaaaaagaactgactcaaatacggtaaagtcagatgttggtgcagaaattggttttcctaataacaaagataaaggtagaggaaaaacagatggaatagttggaaagaattgaaatttaaaatagttttaattcttagattaaaataataatttagaatataagaaaaaataaggaatccctttgcagtaatagtttttatagcaaagggattcttttattagtttcttattagatattcaaatgcacctaaggcagctgttgctcctgatcccatggaaataattatttgcttgtatggggtattagtgcaatctcctgcagcaaatactcctggtacattagtagcaccatggttatcaattataatttcgcctgacttattacgatcgactgtttctcctaaccaatcagtatttggcacaagtccaatttggacaaatacaccatctaattcaacatgcttaatttctcctgtgtcacgttcaatataggtaattccatttaccttatcagttccagtaatttctttagtctgaacattttttaagacggttatattattcaaactgtaaagacgatcttgcaaaactgaatctgctttaagttctggcataaattcaaaaacagttacgtgactagcaactccagcaaggtcaatggcagcttcgatgcctgaattacctccaccgatgactgcaacatgtttccctttaaataaagggccatcacagtgaggacaatatgtcacacctttattcttgaactcttcttctccaggaacaccgacattcctccagcgggcacctgtcgaaattattaccgttttactctttaaacgtgcaccattttctagttcaatctcaataaggtcttttttttctatagtcttagcacgttgtaagtttactatatcaacgttatagtctttgacatgctcttcaaggcttgctgcaagtttagggccttctgtatatttaatacttataaagttttcaatacctatagtatctaatacttgaccaccaaaacgttcaacgataattccagtacgaatgcctttacgagctgcataaatagcagcacttgcacctgcaggaccgccgccaacaacaagcatatcgtatggatctttatctgcaaaattttctgaaactggggcttctccgatttttgcaagaatttcttcgatagtcatgcggccacttgcaaagaattctccatttaaataaactgatggtactgcaagtatatttttactttctatctcttctttaaaaacggcaccatcaatcattgtatgagtgacctttggattaaggatgctaattaaatttagagattgaacaacttctgggcagttatgacagcttaaactaatataagtttcaaaatggtattctcctttaatgttcttaattgaatcaattgttttctgatcaatttttggggctcttccgctaacttgtagaagagctagtactaatgaattaaattcatgtcctaaagggattcctgcaaaagctacaccagtttcttcatcagtacgatttatgctaaagctaggagttcttaataattttgatttttcagcttttatttttggagacatagaaactagttcatctacgagagaaaccatagtgttggatatatcatcggaatcagcactgacttttataagtacagtgccttccataagctcaagatattgagctaattgttgttttatatctttatctagtatcataggcgtacctcttagatctttcctacaagatcaaggcttggtttaagtgttgatgcaccttctttccattttgctgggcaaacttcgccaggattatttctaacatattgagcagctttaattttatttactattacagctgcatcacgaccgatattgccagcattaatttcaattgcttgaataacaccatctggatctatgataaaagtaccacgatctgcaagaccatcagattcaatcaatacatcaaagttgcgagataatgtatgtgaaggatcaccaatcatagtataagttatttttttgatggcttctgaactatcgtgccatgctttatgtgtgtagtgtgtatctgttgaaactgaatatacttcagcaccaagcccctttaaagtttcataattatcttgtaaatcttctaattcagtagggcatacgaatgtgaaatctgctggataaaaacaaactacactccatttacctttgaaattttcttcagtgatatctataaattcaccgtttttgtaagctgatgcttgaaattgttttacttctgttcctattaatgacataatatattacctcctaaaattcatttttatatttaaactatatttatattttattaaatattattatttaataatgataatgattatcacttaagataattataaatctaaattataatttgtcaataccattatgtaaaaatttttttagtaatatttttacttgagttttctaaaatttaaaggtgtttttccatatgttttcttaaacattttagcaaaattagcagagtaattgtatccaaccttatatgctatctcctcgatacttaaatctgttgttgataaaagatttgcagcaataatcattctaatatgatttgtatattcaccaatcgacatatgataatattttgaaaatcctgcctttaatttttgctcatttaaaaagaccatcttacttaagctatttatatttggaggattatgataatttttagataaaatatcatgagctttttgaatagcacgaatatcaaaagaggttaatcttactattctattattaccaatattaatgtttccatagtcaatctgattagtaaaagcattctcaggagatttattgacctcgtttattaaaatagcaatacattctaatattttactttctaagtaaatactatttaataagtttttattagctaagctttgtagttgacggataatttctgtaatttctagaggaagatagatatatgtataatttctaataaaagaatcaaaatcgatcgcattagaaaaattaggttttataatttcggtgaaatatttctcatgtatagttatttcagttccatgataatgctgaccttttgcccatttttgttttccttttaaatctttttctacaacaaagaatgaagaaggcgtaaaagaggatacaggattattttcaagctgaaattctgtaactcccttataaactaatccaaaacgcattagtagctcagggttagaaaaggataaggaaaagtctttaggaatagtataatccgcaatacctaaactataatatccatcccttgaataaataatgcaatgaccaaattcgggtctatccttatttgtatataaagtataattttcattttcaattttactaaaattcaatttttttaagactgcggctttaaactcatcactagattttacaatcataaaatactcctttaatttttatattattagacatatgatatagatattcaaaacaagaaaatgattagttaagatgtaaaactaattaaattagatgtgaatattgcattgagaatgaatatcatctacaattgctttggttaagaataaattctaaactaattataaaatgttgtaaagtatattttagaaaagttagaagtcggagggaattatgaaaagaagaacaaataaaattaaatcagttttagctttagcagcaattgtgtcagtgacgggttcaatgcaagttaaggcagagacttatcctagaataccatcagaagaaggaactatttatgaagcagcggcttataaagacggtaagttttatattaagggagagacaaaagagactgaaaatgaaggggcatattatttaaatagagataagtatattgaaattaatgatatagatattgaaagagaagtttatagaacatacttagataaatatattgagatgaactatggagattactatttggacatgtcaaatggtgagctgtcggaaaacaacttaatagaggatgatatagataatgcatacttggcgttatcaagaaagataagaaaaaacactaaaggaagatattcaggtactagtttgaaaaaagatttagttgaaatccctaatgccaaattcggcaaaagctggtattttactaattacgatggttataatatttacacagattcagaaggaaattatatagatgcggattacaatttaggtaaaattaaggttgcaacaacatcgagcaatattattacattaacaaatacaatggataaaaaagaaggaaccagagcatacgtttcagagtcaaatgtactcggacaagatgcagattatatatatagaactgcaaaggttactattgaaagttatgaaataataagtaaaatagatgggattgacgtaaatgctggaaatgcatttgatacaagtgaaaatgatggcaaaacagtaagttttctagctatacaaaagatttcaaaagagcaggctgaaaataagatagatagtgctaactatgctaaaaatacagttacatatatactttccggtacagatggaacatctgtaagtctacttgatggggcccaaataagtgttgcaggaggatatatagttgagtatataaaagattcaggaacaataacaattcaaactatttcattatatgaagagcgaggaaatcaaaattatgtatatgcttataatattgagccagaagaaataaaaaatatagatatcgatacgaatgggaacctatggaaggttgaaaatggaattgtatataaatttgataattacagtgaatgggataagatttataaggtagatggatctatggataatttatcggtttatgatgaaaatcatatgataatttggagtgaagatgttgatgtttactcaataaaatcagaggatacagaagagataagggtagaaggatctggaccagaagagattttagcaaaaaaattaggatggataatgaataccgatggaagctggagttataataagccagagtatattaaagctactggatggctttacgacgagaataaatggtattatttaaattcttttggaataatgcagacaggatggattaatgaaaatagcaaatggtactatttaagcgaaaacggagcgatgaaaactggatggctaaatgagagtggaaaatggtattatttaaatacatcaggagaaatgctttatgatactacggttgatggatataaactggggattaatggggatttgattcaataatttttaatatgtttcaggcttaagtgattgatattataaagttatttaattcatatataagcaaaaaataatcaattaaggtgcaaaaataattaaatctggtgcaaatattgaaatgagaatgaatgtcatatacaattgtttttgtcggaaataataaagtggaacttaattcagatagaatatgatctatgtataaatttaagttggatttttataatgaatggttactctgtatagaaatgtattacttagtctctaccttaatagaaaagtagagtgtaattcactttgcccattgctctagatgggattttcacagtagctagatagtggaaaaaatataaattatgaaaggaagatacaaaatgaagaaaatttcagtggctaagaaacttttagcagtttgcttaacgtcaatgatatttgttgggtgtacaaatacaagcaattctacagtaaaagaggagaataaaactgttaaagtaactgatgttaaaggagaaattgaaattccagcaaatcctcaaagaatagttgatttaagtggtaagagtgatgttttatcaattttaggatataaagtaataggaacagctaatagtgatgcttataattataaaaaattacctacatatttagaagatacattaaaggatgcaacaatagtaggttatagcatgcaggacactatggacattgaagcaataatgaatttaaatcctgacttaataataatttcaacagtacaggaaaaaatgtataatcagttaaaagaaattgcaccaacagttatgattaaatcagaagcattaaattggaaggaagatgttaagaatttagcaaaagtttttgacaaagaagatgcagcaaataattggatagaaaattatgataaaaaagcaaaagaagcaggagataagattaaggaaactcaggggaaagatgcaacttatttatccttcttagctagcggtggtcaattttatgtatttgatggagctggatttggaaatgtattatatgaagatatgggtttaaataaaccagaaggtatgccagagcagacagatataagcttaccagttgtaacttatgaaggacttgcagcaataaaagcagataatatattcgttcttgcaactgatgaagactcaaaaactcttgaaggaaatgcaatatggaatggacttccagcagtaaagaatggcaaggttgttaaattaccatcttcaccttactttaatcaaggctatagctcaataggaagagaaaaacttttagatgaaatagtggagaagttaaatgaaaagaaataataaaaatgcaataacttttacagtttgtagtatttttattctcatagttgggctaatcctaggcgtaagcctaggagctacccagattggaatttctgaaatatggcatagtatctttaactatagtgaacgacttgaacttgtacttattagagatgtacgtattcctagagttctatgcgtattatttacaggagggattttgggggtaactggagctatgatccagggagttacaagaaatccaatagcagaaccatcgcttcttggtgtaagccagggagctactttggttattgcaatattttatgctatgggaatttcaataaatactacaaatgttatgatagcagccttaattggttcaatatttagtggaattatagtaataggttttatatcaaaaaaagcaaataatagttcaattacaaaaatacttttagcaggaactgctatgagtaccttttttatttctcttacaactattgtagggttattatcaaaccaatctcaacttcttgctttctgggtagctggaggttttcgaaatgcaacctggttagattttaaattagtttcagtgattgcaactataggtttaataattgcacttttactttcaaaaaagataaatatattaagtcttggagatgatgttgcaataagccttgggcaaaatcctgagaaaataagattaataactttacttgttatgataccaatgtgtgcaggtgcagttgctgttggtaaaaatattggttttgttggacttattgtacctcagattgtaagaaaaattttaggagaagattataggataaacataccttgttcttttttacttggagcagttcttttaacttatgctgatattgctgcaagaatgtttttaaatccttatgaaaccccaattggaatattcacagccttaataggagttccattctttatagctgtagcaagaaaggagaaaggttgatatgaaaaagaaaagttttaaaatgacagtttcaatattagcagccttgctgtttatatctttaatattatatttgagctggggtacttataaaatatcacctttagatattataaatacgctccttggaggcggaactaaactacagaaggcagcacttttaaacaccaggcttccaagacttttagttggaatttcagtaggcatagccttatctacagctggagcgctccttcagacaataacaaaaaatgaattagctgattcagggataataggtattaatgctggagcagcagtggcagcagttatttttatttctttaaaaactgaggattattatagtgagcttggtgctttatctatttatgtgctgccttttatggctattttaggtgcaggaatttcagcaattatactctactttttatcaagcagagatagagtaaggccaaagagactgcttcttataggacttggaataaatgcaggattaagtgcttttataacttttttcacttttagaggtggagctggtgattataatagagtactaatctggacctctggaagtctctggggctctggttgggattatgcgaaaataataattccattagtcattataatgtttactctagtaatcatgaattataagaaattagatgttcttaatttatcagaggaacatggagtttgccttggattaaatttaaataaggagagaaaaaaattcttaacctttgcggttattcttgctggagcagctacagcttttgctggcaatattggatttataggcttaatatgtcctcatatggcaagaaggttagttggaccttatcataaaaactttcttgtaatatctgcaattataagttcagtaataattttgcttgcagatgcagtttcaagaaatttattttctccaattgaaatacccgttgggattacaatatcaatttttggagtaccatattttatttacttaatgatgaaggagaattagatggaagcgattagtgtaaaaaatttatccgtagcctatgaagataatttaataatagataatatgaacctctcgattccaaagggagaaataagtataatcataggagccaatggatgtggaaaatcaactctgcttaagactatagggagaataataaaaccaaagaacggtgaaatttttgtaaatgaaaagaatataaaaaaacaaaaggaaaaagaaatagcaactcaggttgccttcttgcctcaggggccaacatgtccaagtggaattactgttaaagaattagttgcctacggaagatttccacatcaaaagatgattggaggcctaaacagccacgacaaggaaatcatagattgggcaatagaagagacaggtcttaaggagtttgcggacagggaaatagataatctatctggaggccagaggcagagagcatggattgcaatgaccttggctcaggaaacagatataatcatgttagatgagcctacaacttatttagatatgtcttaccaacttgaagtattagaggtattagagagattaaataaaaagaataatatcactgttgtaatagttcttcatgaattaaataatgcctgcagatttgcaagtaatatcattggactaaagcaggggaaaatcatatgcaagggtattcctagggaagtaataacacaagaaaacttaagaaaaatctacggaatagatgttaaattacaattaagtgaaaatggtgagtatccaatctgcgtagaatatgaacttatgagaggataacatgagaaataagaactttattataattgttattggtcagataatatctctatttggaaatgcaattcagagattttgtatgtctttatatattttaaatttaacaggaagtgctggagctttttcaaccatattagcaatatcaactattccatatgttttatttgcaccaattgcaggcttccttgcggatacagtaaacaggaaaaaaataatggtttatcttgattttgtaagtagcgtattaatgggcgtctatggaataatacttatgagtggaagagataataccataatagtaggtattgtaatgtttatgttaagtgttatttatactttatacagtccagccgttacagcctctattcctcaaattatagaaaaggaaaaattaccttcagctaatggaataattcagcaggttggatatgtagttaatttgcttggaccagtactcgcagggattttatatagttttattggaataaagctggttgtaataataaatgctataagctttttaatatgcgcaatcttagagttatttttaaatattcctgatttggaaataagggagaaatttaaaaatcctatcttaaaatccataaaggaaatgaaaaagagttttatatatttaaaggaaagaaagacaatcgtcttaggaattatagtttcttatgctctgactaatatttttgtggtgccgattttaagtgttgtgactccatattttattaatatacaaatgagtctgccttccagtatgtatggttttatagaagctatatttgttgcaggcatgataataggaggcatggcaataacctttaggcctaaattatttagtgtgaaaaaattacataagaccatgtatcctatggtaattgctctaataattatgggaatagctgtatacttaaatgctgaaaacaaattctttattttagggctttattcatttggaggttttggaataatgttatctttggctttatctaatattatatctttaaactatattcaacaggaagtaagggtagatatgcttggaaaggtcagtgctttttctacagcagtagctacagtaagcgtgacccctggacaactgatttttggacaattaatagattttaattttagcctttttagcattgttattctgaccactatttctagcgttggagtagtgtattttataaaatggaatgtaagaaaagcttaaaaataaataactaatccttaacgtatattgatgtaagtaaattaaattatagagtatagttagagaatatttaacaatgattgagacgttataaatattaattaaaagctggggtgctcttatataagaaagcctcagctttatttatttcatattctaatgagataatcaagtagactaaaaaattatattgtgtgattagtaaagttaccactgaattattgggataactgatgaactttataaagctgtttttgaataatcagcgagtttgctgttgttttaaacttttttaaaaagtaatcaagtccgatattaaaaatttacgtattttcgaacaggtctaaaaaattctttccagatgatgaaagataccctgtttttgaccatattatagctatctgagttgttaatatgtcactatcaatttctttgtaaattatacttgaagaacctattaattttattgcagattttggtactatggcgattccaagtccagaattcgcccaaagcagggaagtccgtgcatcatcatttttgcaaaatacagttggctgaaaattaaaatcttggcatactttaaatatgagactttcaaatcgtctatagaatatcaagggtttatcatttaattcagtaatgtttatgatttcactatcagtccagtttaagtcttttctcatagctgcaaccataggctcttttggtaaaaaaattgagtttattcctgaattgttaaatggagttcttacaatagcaatttcaattatacctttatccaataactctaataattcataggtattcccttcatgaatttcaaaatttatgaaaggatatttttcgtgaaatatatttaatcggctatctaaaagtgacgctccagatgaagatacagtacctatggataatgttccatgatttccttgtttaaaatcttttaattcattttcagtagattttgttaaagataatatctgcttagcgcgtttataaagtataacgccagcatcggtaagtcttatatttcgacttccgcgctcaaccagtttaacgccgagttcatcttctaagtttttcaactgatagcttaaagggggctgagccatatgaagtcttttggctgcatttgttatttgtccttcttctgcaattgcatagaaatatttcaattgtttaatatccattttttatccaccttctgatatacaaaaaatatatggcatcgatacatattatgtattttttatatagatatgtttttgttataatgataaaggaaattttgagaatgttcaataagacattacagatagggggataaatattgaaatatttattaaaattcgtaaaaccgtataaaaggcaagttacattaggtcctatatttaagttgcttgaggctgtctttgaaatatcaataccaacaataatgatatttataacagataagggaataggaacaaaaaacataaactatatatttgaaatagggttaataatgctttctatggcaattttaggtgtgttatcatcttttacatgtcagtattttgcatctattgcttcacaagggtttgggacggctcttagaaatgagatgttcaaaaagataggaactttttcatataatgagattgatgattttgggacgccatctcttattaatcgtgttacaaatgatgtaaatcagcttcaacttggccttgcaatgcttataagacttgctataagggtgccgtttctttgcatcggcggaatcataatggctatgtatcttgacgtgaaattgtcgcttataatgtatttatcaattccattctttgcttttgcaatatatcttattatgaataaatctcttcctctatataaggtggttcaaagaaaacttgataagttgtcgcttattttaagagaaaatttatctggagtaagagttataagagcattttcaagagtagaaggtgaaaaagtaagatttagagaatcgaatgaggaacttgcaagcactgcaattaaggtaggaaaaatatctgcgcttatgaatccagttacaagtgtaataatgaattttgcacttatggcagtaatttggtttggcggaataagagtaaatgtaggtggaatgacaacaggacaggttatagcttatataaattatataaatatggtattatcggcgctcatagtacttgctagccttatagttacttttactaaagcagcagctagtacagctcgtgtaaatgaggtacttagaacagaaccaagcattaagtacagtggaaattctgagtttagtaaaaatattaataaagatattccaataattaaatttgataatgtatctttttcttataaaggatctaaggaagatgcaataagtaatatttcttttgaaataaaaagaggacaaatggttgggataataggtggtacaggttcaggaaaaactactttagttaatttaatacctagattatatgatacaagcaaaggaaatgttttgctaaacggaattaatgttaaagattattataaaaaagaaattgataataatataggtctagttcctcaaaaagccgttttatttactggcactgtatcagaaaatataagatggggttctcaaaatgcaagcatgggtgaagttaagaaggcggctgaaattggaatggcagcagattttatagaaaaaatgcctgaaaaatatgacacatatatatcccaaggcggagttaatttctctggtggccaaaaacaaagacttactatagcaagggcattagtaaagaaacctgaaatattaataatggatgacagcttaagtgcccttgattatgctacagatgctgcacttagaaaagctcttaaagaaaattccagtgatacaactgtaattatggtaactcaaagaataagcactgtaaaggatgctgatttaataattgtattagatgacggaaaacttgcgggagttggaaaccatgaacaattgcttaaagagtccgaagtttatagagaaatatgtagctctcaaattacaaaggaggctatgtaaatgaaaaaaagtacattttctagattaattagttatgtttctaaatataaaggatatatgtttgcatctctgatttttgcactaataagtaatatacttatagcatttatgccgttaatagtgggaaggtctattgatcatatagttgctaaaggtgaagttgattttgatggattaattaagacaattataatactaggagtaatatatgtaataagtgcactatttacgtggctatttactatagtagctaatactgtagcatataacacagtaaaggatcttagaaatgaagccttaaataagataagctctctgcctttaaagtactttgataaaaatcctcatggagatattataagcagacttacaaatgatatggataatgtttcagatgggttatttcaagggataacacaattttatccaggaatcataactataataagttcacttgttttaatggtaagtttaagctttaaattaactttagttatagttttaatgacacctttttgttttcttattgcttcttttattacaaagagatcaaataaaatgtttaaagagcagcaaaagactttaggtgaattaaatggttatatagaagaaatcgtgggaagccaaaaagtagtaagactttttggatatgaagaaagagctcaggagagcttttcaggaattaattcaaggctttacaagtgtgggcagcttgcgcagttttattcatcacttacaaatccagctacaagatttgtaaataatattacatatattttagttggccttgttggaggaatactttcggttttaagcgggttaagtgttggtgttatttcaagtttcttaacctattcaacacagttttcgcaaccaataaacaatattactagtgtagctactcagcttcaagcagctcttgcatcttgtgaaagaatattttctattatagatgaggagccagaaaaagcagattctaaagaagctgaaaatatagagagctgtgatggaaatgttgagtttgataatgtatcattttcttataataagaaagttccacttatagaaaatttcagcgttaatataaaaaaaggaagcacaatagctattgtaggaccaactggtgctggcaaaaccactatagttaacttacttatgaggttctatgatttagagaaaggtaggattactatagatggcaagagtataaatgaccttacaagaaataatcttagaaggcaatttggtatggtgcttcaagatacatggctatttgaaggaaccataaggcaaaatattgcttatggtaaaccaaatgctactttagaagaagttgaaaatgcagctaaagctgcctttattcatagttttataaaaagacttcctgatggctacgatacgattataactgaatctggaggaaatctttctgaaggtcaaaagcagcttttgactatagccagagtaatgttaattgatccgccaatactcatattagatgaagcaacaagtaatgtagatacaagaactgagctaaaaatacaaaatgcatttctttcaatgatgaaaggacgtacaagctttgttatagctcatagactttctactatacgtgatgcagatataatccttgttatgaagaatggtaaaattactgaaagaggaaatcatgatgagcttgtaaataaaggtggaatttatacagaactttataatagtcagtttaagcatcagctgtaaaaagatgtttatatatttaaaaaaatttatatgttagtataaattgtataggtaatatcatatttaataatatagcttttttatcatgagtctcttaaagctatagaggatcataaatttttaaatgtataagaggtagaaaaatgaaacgtaataatagtaatagcactaaaaatattaagagagcgagaattactatattaattgttgcagttgcattacttgtaattataggaagtatagtagcagcacagaaattttcaacaggcagtaagacggtacaagctgctagcagcacgggagaaagtagtaatgatgataaagaaaatagcgattcagttaataaagaaagtaatggcagcgtagaagatgttgcatatttagaaaagtatattgagcagcaagagaagaaccaaaagcccgatggcgctgatggcaaaaaagttgcttacttaactttcgatgatggcccatcgacaacagttacccctcaaattttggatatccttaaatctgaagatgtacatgcaacgttctttcttataggaaagtatgtagataaagatgatgcaagcaagaatttagtaaagagggaagtagcagaaggtaatgcaataggcatacattcatattcacatgactatggttacttatttccaaagggtaaaataaacttggagaattgtatgtctgattttgataaaacagataaagctttaaaaaacgttttgggcgaagatttttcaacacgatcaattaggtttccaggtggacaagaaacatggagtaaaaaggatcctcaaggagcagaaaaagtggacaaagccctacatgagaaggattggcatcaaattgattggaatgcattatcaggagatgcagaaggtactcataaaaagaatgcagatgaactaacccaggaagctataaaaagtattggtaatagagaaaaggcactgattttaatgcatgatacttatggaaaagaagaaacagcgaaggctttaccaagaataatagaatatttaaaacagcaaggctatgaatttaaaataatagaataattaattattatctccctcttatttataaaataagggggagactttttgttctctaggactttatgttcagattaaacatgtggacattgtaccacttgagagtataagttatggaaacactaattcagaaagttaaggtcattaagccaatcgaaaattaaaaatatgaatgatttttattacttatattatattgttaattttaagttatagtattgtttaaagcgcattgtataaatagccaatgaattaagagattgggtggtaaaatttagctttcatttatacctacattagtataatatgtaaattgataaaatgaaatttatacaattgagttaaaagagtataagttaatggttattgaaaatgtaaaattgtattttaaaataatatatgttaaagaactaagattaggagtgaagaattttgatacttagcaaagaagtggttataaggcacagtaaaggattgcatgcaagagtcttggctatggttgttcataaggtaagcgaacttgagaagagatatgatttaaagttttttataatttataaagataaaaagaaaattttagctacaagtcttatgcccctggttttattgaaggtaaagcagaatgagaaaattatagtagaagttcatggagaagatccaaaaaatgcgctagatgaattatgtgattttctacaaagtgattttgatttagaagataaaagtactattaatcaagttgataacataataaataataatactataacgttggagcacgtatttagtaatatacctaatggaatcattgctacagatgagaaagatataatttcaatattcaatgaggaagcagaaagattattagggatatcttctggtgatgctattggtaaaaaagtatatgaaataatagaattcacaaatcttcatgaaataaatagaactggcaaatcagagctaatggtaaaagaaataataaataatagaatattacttataaatagaactccaataataatagacaagaaacctaaaggtgcattagcagtatttaatgatatttcaaaattagaaaaagttaaagatgaactaaaaacggtgaaagatttgaaagagaggctacagcttatattagaaacagtacaagatggtatatgtgttataaattcagatggatatataacatacgtaaataaggcttatcttagaattttgaacgaaaaagaagaggatatattaaataaaaatattagagatgtatctccagagggggcaagaattaaagtacttaaaacaggagaaagcatcataggggcaatcagctataaggaaaatggtgtaataatagtttcaaatgtaaaccctatagtgattgatggagaaataacaggtgttgtgtccatagttaaaaatgtaacagaagttcaaaagctctcagaaaaattaactcaggtctctgcaaaagctgattatctagaagaagagcttatgagaactaagaaacctgattctgctttttcgaagtatataggtcatagtgggaagatattagatgcacttgctacaacattaaaagcagcgaaaacagataccacagtattaataagaggagaaagtgggacaggaaaagaattaattgcagaaggaatacatttttcaagtaagaattccaaaggaccttttattagagtaaattgtgcagcaatacctcaaaacttattagaaagcgaactttttggatatgaaaaaggagcttttacaggagctataaaaagaaaattaggtaaatttgaattagctcaaaatggtactatacttctagatgaaataggagaaatggataagagtatgcaggctaaagttttaagagtaattcaagaaaaagaatttcaaagaattggtggagaagaaactataaaaataaatgttagaataattgctgcgactcacagaaatttagaagaaatggtaaagtcaatggaatttagagaagatttatattataggttaaatgtaattccaatatttttgccgcctttaagagaaagaaagcaagatatagcgcctttattagaacactttatagataaaataggtaaaaggataaataaaagaataactgtagtaacaaatgatgcaatggaatctctattagaatacaaatggccaggaaatataagggagttagagaatctggtagagagaataatggctttaaatgaaacagaagtaatagaattaagtgatcttccagcttatatgagaaaagatataaatacagttaaaaatgcaatcaaaagtaaaaataataatgaaatagacatgcttattgaaacagatgaaatattaccgctaaaggaatatgaaaaaattataatagaaaaagcacttaagaaatatggaagttataatgctgcgggaaaagcattaggacttactcataaaacagtagccgcgaaggcaagacaatatggaatagagaaaaaggtaacttgggaataaaaaatagcaagttggtaaaaagtatcatgataaaaaagaacaacttgatactttttaccaagagatatactatttatattacaattttttgtaaatgtttacttgcactttaggctagaaggctcgaaaatacacacttttaagtatatttaattagtaattgaaattgtggcatgagtattgctctatataaaagtacaaatataaataaaaacaaatcaaaattatttacatatattctaaaaaatttaattcatgaaagttatattatattacttaggtaataaaggttaataattttataatgaatgaattatattatttagaacttatatatattgcaaaaataattcttcatcataattctaaaaatattaaaagaattttaactgtaattgtgaattgtgaattgtgaattgcaacatatgtatataaattagatataaataattttaatcataaagaatatttaaatatgggaggaagaattttatgaaaaaaataattaatgatgcaaatctagtgcttgaggatatgttgaaaggaatggtagctgcacatccggaatatataaaaaaattagaaaatgcagatgttttagtaagagtagattcaccaatagatggaaaggttgctttagtaagtggtggaggaagtggacatgagccagctcatggaggatatgtaggaaaaggaatgcttgatgcagcagtagcaggagcagtgtttacatcacctacaccagatcaagtatatgaagcaataaaagctgtagactcaggtaaaggagttttacttgtaattaaaaattatactggggatgttatgaactttgaaatggcaaaagatatggctgaaatggaagggattaatgtaaaagctgttgtagtaaacgatgatgttgcagttgaaaatagtacttatacagcaggacgaagagggattgcaggaacaatatttatacacaaaatagcaggcgctaaagctgaaacaggagctaatcttgaagaagttacaagagttgcagagaaagtaatatcaaatgttagaagtatgggaatggctatttcatcttgtattgtaccagctgctggtaaaccaaatttcacattaggagaaaatgagatggaaattggtatgggaattcatggagaaccaggaactcatagagaggaaataaaaacagcagatgaaattacagaacatttaatgagcaaaattctggaagatatcaaattgagtagtggagaagaagtagcagtcatggtaaatggcttatcatcaacaccacttatggagttatatatagtaaataaaaaggtaaatgaaatattggaggaaaaaggggttaaaattcataaaacatttgtaggtgaatttatgacatctcttgaaatggctggattttcaataacagtattaaaacttgatagtgaattaaaagaattattagatgcaccagcaaacacaccagcatttaaagtaatataaagcaaagatttttaggtagagtttttgagattagatgaatttagtagggcatatctaagagtgtgacggattctgctaccaaagaattataatttagatgaagctttaatatataagcatcatctaaattaggctatataggaggaatagaaatgagtattcaaggaaaaaaagtaattgaaatattagaaaaaataagtgaaaagatagatgaaaataaagcatatttatcggagctagacgctgcaattggagatggagaccatggacttaatatgagtaagggatttaaggctgtagtagaaaagataaaagacgatgatggaaatgatattggaggtatattaaagaagtcaggaatggcattagtatctaatgttggtggagcttcaggaccactatatggaacagcttttatgaaggcagctgtaagtgttaatggaaaatcggaaattgatattaatgatttcgcaaagatgctagatgaagctcttaaaggtataaaaatgagaggtaaaggtcaagctgatgataaaactatgatagatgctatagagccagcattaaaatcaataaaagaaggtatagatagcgggcttgaagctaaggaaattttaaaagcagcaaaagaagctgcatataaaggtgtagagcatacaaaagaaattatagctaaaaagggaagggcaagttatcttggagaaagaagtttagggcaccaagatgctggggctacatcttctgcaataatattagaaacaatatatgaagctttaaattagtagtttttattttgagttacatcaaaatagtcgttgaaggagaatatatatggtaggaatagtgataatatcgcatagtaaaaatatagcagatggtgtaaaggaattagcaagtcaaatggcacctaatgtagctataggtgtggctggaggaacagcagacggaagagttggcactgatatggataaaatatcagctgcaatagaagatgtttattcagaagatggagtaattattatttttgatttaggcagtgcctttatgaatgcagaaatggcaatagaatttctagatgaaaagatgaaggaaaaaataaagatagtagattgcccaatagttgagggagctgtgacagcagcagttgaaagtagtataggtaaaaatattgaagaaattgaagaagcattaaaacctatgaatttagggaaaatgccttgaaataataaaatagttatctgaagaataatattttaatagtatttatatagatcaagaagataaatttctataatataaatagaaatttatcttcttaattttttacaaagtatatatatttcaattcacaatgcacatttcacaattcacaattgcggataaaattcttgaaatttttttagagttatgatgaaggattattcttgtaatatatatcatttttcgtgataagacattagtgacatcatcattaataactacaataaagcatattataaatgaaagctaaaagttattattcttgcttgggaaatctatatatagataagccaattataagttagatttatactatgaaatatatctcaactagaaactggaacaaaagtatgttattcatttcggcgagttatatgcataagttcaggttttagttgggttatctataattgaaatttataaacattgacttgaaaaattttagttgatactattaaattgagaattgttattaaaggagagggattatggaaaaatatacactaaaagttattgatataattgatgaaacagataatacaaaaacatatttttttgaaaaaccagaaaatttaacatgggaacctggctcacatacccatattgggcatattgggtttgatattggtgatcagcctacaaaagaatgggtaagacacatgtccattacaactttaccagaggaaaataaaattgctataacaacaagggtaccagggagcaaatcggaattcaagaataagctatcagaattaaaaattggtgatgaagctgtattttttaagataggttcaagaatggggttaagacgtataaataaacctataatcttaatatcaatgggagttggaatagctactatgagacctcttattttatcatttattaatgacaaaactaatatcccatacttatcaaatataaatatagactcatcaaataaatttgtatttaaaaatcaactggataaattagcagatgacaattataagaattattggataaattctaggaaagaattttatgaaatacttagccaatcaatgaaatcagaggatgctatgtattatgtagttggaagtgacgcatttataaaggatattattcaaagattaagagcaaataacgttaaaattgatgatattgttatagatagaaaagatgagagaaaacaaaagtttttagaagactaaagatgattaaaagggttccttctctcatttttattgagagaaggaataatattttatttattagtggattccagggattttaggaagacctaagaatcctctttctaagtccttatcggttggaatgtaatcttgcattgaatcatttagataagactcataagactaaattatacttttagaatgagtcggtctaaaatatacaaaattatatttacattaaattccaaagatgatataattatgcttgtgttgtgatagataaaataaaaattctttgggttatttttaaactcacttgaatgatcttttatataaattattcatgaatttattcgaattataattatttaaagaataaaaaaggacgttcaattataataacttaccatctcgcgtaattggtacttacgttttttaagcaatataattatactagtcctaaaaatataaataatgtttcaactatatatttgtgctatcgttatttgaagagttttaaaattatagagattagattgagtagctcactaagaaaaagaaatatatttttcattaaatccttatcgaaacgcctttttacatgtgcacgtttcatatgctacgcctccataatatatcgatttgagatggcataataattataacatcaattggtaaaaaatacaaattaacattaatgatatgttaagcagtagtaggagaatttctactactatttttgggttttaagaaaaaaatatataatatgataataaatgtgatgtttcattgttaaatcaaactatgtacctataaaatatgtgaaatattactaaatattactgtgcttaattatgacaggcatttttagatattattttaattaaatttattatatattgaaattaagtagcggttcaatttcatacatttttaaaaaggaatatatattcaaatgtagtgtttctattgaataattttcgttgattattttaataaagtatattgaaataaatgaaatttttattagctcgaataaaatataaggtcttaattaaaataaggtataacaatttttagttgattgacgattaattaacgattatgatattatatgcatatacatataatatctgttttgaaaaatttatttttattgaataaaaaattttaacaaaatatatgtatatgcatataattagaatggagttgattaattatgaaatcattattcgatcaaacgcaaattggtccacttaaattaaagaacagatttataaggtctgcaacatatgaaggaatggcagatgaaaaaggaaatataaatgatgaactatttaaagtttatgaagatttagctaaaggaggtgtaggaactataattacgggaataacatctgtgactgatttagaggaatttattccaggccaaatgggaatttataatgattcatttattgataatcataaaaaaattattgaagtaactcagaaacacaataccaatataatattgcaacttggagcagcaggaacacaaactattagaaatgaagaaaaggcaattttaggtccaagtaatataacagatttgggatataaaaatactcctaaagaaatgactttggaagaaattgtttcaattcagatagattttgcaaatgcagcgcttagagcaaaaaaagcagggtatgatggtattcagatacatgcagctcatggatatttacttagtaagttcttaacaccttattataatagaagaacagatgagtatggtggtagtattgataatagatccagaatgcttatagaaacgtataaaaaaatacgtgataaagtaggaaaagattatccagttttagttaaaataaattgcgaagattttatggatcaaggcatgacttttgaagaatgtaaatatgtatgcaaaaaacttgaaaatcttggcatagatgctgttgaaattagtggggggagtttatcttcacgcccaaatgagagttattcaagaaaaatagtgaaaggacaagctccttactatacgttttatgctgaaaggataaaggaagaagttaatattccagtcatttctgtaggcggaatacgtgacatttcagctctaacaaaaattcttaatgaaagctccattgattattttgcattgtccagaccattagtatgtgaaagtgatcttattaatcgttggagcgaaggtaatactgagccatcgaaatgtatatcatgcggtaagtgttcaggatttggcaaaacaatctgtgtttttaataggaaataatatcttaaacttaaaaattaatgatatcatgagataaaaataatatattcttaaataaagctggtttttctgaaatctgcttgtgagtatattgacaataagaattgctatagattactatatgtatattcagaggttttgacggaggtaatttatttatgtctaatttagatgatttaaagaaaattggaagttgtgtttgtagaaatttgcgcatgacaacaagggtcactactcagtattttgatcaagtttttcaagcggttggattaacagcgccacagttttcattattagcagatatagcatctcgtgaaaatgttgctgtaagtgagttggcagaggctttgctaatggatcagacaacagtaactcgcaatattgaaattttaagaaaaaagggatatgtagatgtgcgaacagatgataatgattcaagaagaaagtgcatttcaataagtgatgtcggaattaagaagctcgatgaggcaattcctgtatggaatgaagtacaatcaccaatagagaaggagataggcgctgagaaatttgaagaattcttaaaaacgttagcgcaaatacaaaattttattaataactcttccaaataaagtacctaagtaatgatttaattcatatttatgacttagttgtagccatatattattttacgtcttatcatttatagaaatagtttgtttaatgataaaaaagtccttaatttaaattcatatgcatgttaattaatgcgaaattaatagctttatagatatagttgaaaagaagtaatagtaacctaaatctattagtgataaactatattattttaaaatatatgtatatacatgttaaagttaaaatttaggttgaggatagtattttgtgtgtatattaatgagggaaatgagaaagtaagagaaatggcggagttggcagttaaaaaacttagcatttaaaaaaataaagagtaaaagtaagagaataaatcaatgtgattttattaagctggattattcctataaataatatctattttatagcttctgtataatatataaatataacatatccgaaagaatatacttagtaaagtttttgtatttcattgagtatattagaaacttttaaaattataataaagtatatttataacagaattaatgaaaagggatgattttaataatggaaatatacaataaaaatgtatataagaataggtggataatattggctgttgtggttttgcttccgtttatgggcacccttgatagtacaatagttaatgtagcacttcctgttatggtgaatatattttcagtaacgatgtcttctattcagttaatcgtaatctgctatcttataacaatagttagtacaatattactgtttggaaggctcggtgacataaaaggaaaatctatagtatttaatttaggtttattggtgtttaccataggttctttattttgtgcgctatcaaaaaattttacgtacctattattttttagaatagttcaggcgataggagcatctgcggctatggcaaacaaccaagggataataacgcaagtatttccagctaatgaaaggggtagagctcttggaatatcgggaacatttctagctcttggcacaatgattggaccgccattaggaggtattataatttcttacttaagttggcattatatatttctaataaatattccagtgggaataattggaacagcaattggttttaaagcattgcctcgtaagtcaaatgaaaagaaagaagacattgattttattggtgcaataatttttggtataagtgtcgtattattattttattctcttataaatggacaaactgttggttacgataataacatgattagaattatttttattacagctataattctatttataatattcatacgaatagaaggaaagttaaaatatccacttctagatttatcattatttagaaattcactttttacggttggaatattatgtacattcatatgttatgcatcaattaacagtaataatattgtacagcctttttacctcgaaaatgttttgaaaatgactccaagttttgcgggaatgataatgatgatctctcctgtattaataacagttatttctccttttagtggttatctatcagataaaatagggtcagaatttctaacatttttaggattgatactcataggaattggaatgggtttaatggcgactttaaatgaaaactctaatatatatcaattaattgtatatatagtctttattgctattggaaatggattgtttttacctcctaataattccttagttatgtcttcagcatctagtgataagttggggattgcgggaagtataaacgcttttgtaagaaatttgggacaatcatccggtgttgctatggcgacaatgcttttatattcatttatgagtatgaaaatgggagagaaagtacttggatatatagagggtagagatgatgtctttatgtatggaatgaggtatgtatatgtttgttcggccattatctgttttgttggagtaatagtgacttatataagattaagaaagaaaaagttaaacagaaaaatatgatttcttaagtgctgattggtatgctcgataaagataagttttttaagtctgattattacgaaaaaagtcaaaaacaaaactttatatttatgaattgtattggtatatagataccataccagaaagtaaaaacatttttatgcagcaggcattgaaaatgagctgttaaaagctcttaattgtaggttgttccgttaacgcttgtcacaatgaaattgggagcaagcattaattgtgcaacctgcaatttagaactctcagggaaattttcatagtcctgtgaaataacaatgtttttactttcggagattattgcataagcataagttgtatattgtttatccatatagataacgcaatcataaactatacttagactatgaaatagcttccaactagaaactggaacaaaagtatattactcatttcggtgaggtatgcgcataagtatagattatagttggcttatctatatattactgagatttaagagttgtaattaccaatgtaatttatttaactatataacctcgaactctttgtactccgtagctattcacccttcgaaagtagtcatgatcgtcttcaccaggttctcgttgtacaaatacatctaatctattatctactccaaaatacttatctgaacctttatcattaacagtaacttgtccataaccatccaaatatatttgggtattcagaggtattacgttatttgcaacgccacctggagttaatggcttattttgacaggtcactggaccagcactactattttccgaatcaagagatgtataaaaagttaatataaagtctttccattcaggtgtaacactcttttcttgttctttttcttcggcttccttctttttggtcaattctctttgctcaattttttcattatttatttcatctataggattttccttaaattctattttttctttatgtgttatttttatattattatcttctacaacatctgttgctaaagcgttaaatggtgttattgtgcttacatcatatgtatcaagtattaaaatgatgcttaataagcacactagcctctttactcttagcatttgtccactcccctttgttggtgctttttaatgagacataataggctctaataaattataacacaaatgtaaattatttacaaaaagcaaagggcatttatagatatgtacatgtgagataacttattgagagtaaaagaaaaacaatcaaaatattaattgtggtttttagaagaaatgacaaaaatgcaatattccagccagcaatatatgaattttaagagaaagtaagcaattatataataaggaatctaataaataacagtaaagaaaaattgtgaattaataatttatagataaattaattgatgtgtttgtaatatttaacaaatatatgcaatgatgtttaatatggtattaaaatatggtaatatagatatgtaattatgtataaacctttatagcaataatatggaactaaaaaatgcagtcattagtttggctgtattttttatgcaaattaatagtggtataataattatggttagtcgttttaatataaaaaggtattaatcagaataaacttaagaaaagctaggagtttttatttatgcatgacaatttattattaatagacggttcgtctcttttatcttgctgtttttttggtaatcttccaagagaatatagatttgctaaaactgatgaagagaaggataaatatattgaaaaattacgtcaatcacctaaaggcgagtttactaatggggtctttacaatgatggcatcaatgcttaaaatgattaagaatcaaaatcccactcatattgctgtggcttgggatttaactaaagaatttacctttagaaaaaaattatattcagagtataaaggtactagaaaggatatgagaagtgagctgggtagccagtttgcattagctcaaaaagttctaagagaaatgaatgttccagagtttgtgtttaaagagtatgaagcggatgatataataggtaccttggcaaagaaatttggaagatctatgagagttagcatttggactaaagatcaagattgccttcaacttgttgatgataatgtaagggtatggcttataacttcaaagtgtgccgatatgtacgaaagtcttggaataaatattaaagaacttaatatacctagcggtgtttttgaatttactacacagtatgtaaatcatttttatggtgtagatcctatccaaattattgacagaaaagctatagaaggtgattcttctgataatatccctggaataaatggagttggtgaaaagtccgttataccattgcttcaggaatttgaaacagtagaaggtatatatgattttatagaaaattcacctgaaaaagaaataaaaaaaatgttcaaagatcttggcatattacgttccccgttatcaaagttagttgaggaatcaaatgaaaaaatagtcgggaaaaaagcagctttgctttgcaaacaattggccactataaagtgtgatatagaagaacttaataatataacaatagatcaattgaaacttcaaatagatgaagagggaatgaaaaacatatttactgaacttggatttacaaatttgctaaattaatgggtaatatgtttctagtgattaaatataggagcgacacactttaatacatatgtaattcaaaagctagcaatagacaggttaataaatattaaaataaatgtaaaatataacatttatacataagtgatatatattaggaggaataagttatgaaattttgttggagtactttaaaagttaaaaatctagaagaatcattgaagttttatcatgagattgttggtcttaagactaataaaagatttaatgcaggacctggaaggaaaattgcatttttaggagatggagaaactaaaatagaactaatatgtgatgaggaagtaaaagaagtaagttatggcgagcatatttctcttggatttgaagttgactgcatagatgagaaaataaactttattaaggaaaaaggaatagaaattcatagtggaccatttcaaccaaatcctaatactaagtttttttatgttttagatcctaacggattgaagattcaatttgtagaaaataaataatcacaaagctgttggaattctagatagatatttaataaagctgaaaatccttcaaatctgaggattttcagctttttaaacaatagtttaattaacagaaaattttcgttttaatattttaccattttcctttgctcatatgcgctgctaattctgcttttgatatttgcttaatagtccaagcactatttttagctttttcaaaagctgttacacatgtaggatctaaatttaagtctattccttctctagaaagtttgaaaattttatcagctaagttaatgatctctaaatgaatatcattagttctatcagagtgatagattttatcagcctcttcactagttaattcgacaaatttttctttaggaactccacattttggacacttttctggagcttctactccttcacatataaatccgcacacactacatttaaataatttcttcataattattcctccctttaatcataccattagattattaaaacatatactaagtaaatgttctcaatgttattaatttgacataattggttaaaatcctcctaaaattgaaaaaaaacttaaaaatatttttctttaaaatatagattgacgtacataatttgagtatgtaaaattaggataaataaagaatgtaatccataatagtaaggaaatgaggtgtttgaatgaaggaggatttattatattctgaaaataaaaaagataatagaatatcagtattagatatatttacaaaaaacactattaaatttaagaatttaattaaatataaatttaaaaaatctagaaaagcagagaagctaacattagaatctgcaaaaaaacagtttgaagagcttaaagctaagaaagaagaattggaaaagtatgaaaatgaatttcttaagtatgatgatcaattaaaagaaatggattattgtctaataaaatctaatgatttaaactctgtaattagctgtaaaaaagaaagtttatctcgaagattttttaaatatgagaatgtgaatattgatggtaaagcaataaatgcattaatgttttttgggaaagaaagtattattcagatagaagaaactataggccagttaaataaggatgaaatctcaatagaaaaaacatataagttaagtaaatttaggattaagaatatatgtgatttatatataagttatgaagaaaataaatatgtaataaaaaatatagaacctttagataaagaaatatatggaacattgaatgaaatcacaaacaaatatgaagagtatcacttacaaaataaagagataagagataaatttattaaagctttttctgatgccaagtatgaacttaatattgcgagcccatggatgaataattatgtggttaacaataatttgataaatatgatggaaaatttactttcaagaggaggagctatcaaaatcatatatggtatagaagaaaatagctctatttatcacattaaaaaggatagcaataatagaagtaagaatagaaatagcgatataatagcagaaaggctaaaagataaatttaaatattatggagggaattttaaaataaagaaggtgaactctcataataagcttttaatctgcgatgagcaatattatatggagacaagttttaatttattatctttctcgggagaatatgacgaaaattctaaggatattagagatgagggggcaacttatagcactaatatagaggttataaaagatttgagaaatagatacttcgatttttaatagacaatatgcgaacgactaaatgccaatctgtgcttagattaaatgtaaatcattaaagattgaaacgagatgtgttgaaattataaaataaacatatctcgttttgttttttttataaagcacttgttgatacttaaaattcaatgttatctatttcgtcaaaaaaatacataagcttttaagaatgtttatttgaagaatggaaataaattaatgagataaacttttacaataaaaaataatgaaatattaaaaatattgtataaatattagtgcgatgatataataagattcaaagaataatttatataagtttacatttatttctattaaaattctacatatttatataagaaattggggtggtgatatttataattaacagaattggaaatacagtgataggaagaaaaggttcattaaggcttttaataagtgtattatttattacacttatggctacaactgttggtattataacctatattatatttaataattggaaaagttcggtgaacaatactatcatgaaaattgaagacgattccaatcaggatgtttttaatgaaatacaatcgctatttagcatacctctatataacaatgaggttaatcacacttttattgaaaacaaagttatagacatgcataacaaagatcagagagatgctttttttgcaggaatagttaaatatagtagtgatgagatttacagttttagttttggtacagaagatggtaaatactatggtgctagaaaaaatggaaatgacgatatagaaatatatagaagtacacctgaaaccaaaggtcattctttatattataatgtagatgaaaatttaaagcagggaaaatttgttaatgattatggcgatttcgatcctagaacaagagattggtatataagtgctaaagaaaatggaaagccggtattttcttccgtttataaacattttacaaaagatgatttggctttgtcagcggcatatcctatttataataaagatgggagtattcaaggggtaatgggaactcatatagttctttctactcttaatgaatccttggaaaaaatcgccaatgagaattcggcttcaatatatatagttgaaaagaattctggatttctagttgcgaattcgttaaacaaaactaattttgaaatactttctgatggaaatattaatagaactttagttaagaatattacggataaatcaattaatgatgcatatgaaaactatataaatacttctaatacaagttttatttcggaagttaataatgagaactaccatactaaaatatttgagtataataaagatggtctggactggcttataataacatctgttccagaaactatttttacaaaagaaataaggaataatattaatatagctatagaacttactgtgattgctcttattatagctgttattattcatataaagagtactaaaattatattgaaaccaataaatcatttgatagagatatctgataaattctctaaggggaatttatcagagagggccaaggtttttagaaatgatgaaataggaagtttgtctaaggcttttaatagcatggcggaagaactgtgttcgtttataaataaccttgaagaaaaagttaaagaaagaacaaatgaactgattattgcaaaagaagcagctgaagatgctaatatggcaaaaagtcaatttttagccaatatgagtcatgaaataagaactcctcttaatggaattgttgggtttttgagtatcttggaaaaaactgacctagatagtacccagcaagattatattgagacaatccaaacttcttcagaaacattactcgtagttataaatgatatacttgatatttctaaaattgaagctgggagaatggaaatagagaaagttgcttttgatatccgttctgtaattgaaagcactatatttctttatgatgcaaaagcaagagagaaagggcttgaacttaatatgcttataaattcagccataccaagttgtttggtaggagatcctactaaaattagacaaattataagcaatttagttagcaatgcagtcaaatttacacacaatggagaagtatttattgaagtttccgttataaaagaaacgaacactgaagtacagctttattttgaaataagagatacagggataggcatgaatgaggaagagataagtaagcttttcaaaccatttagtcaggctgattcttcatcaactagaaaatatggagggactgggttaggccttgcgatatgcaaaaaaatagttgagatgatgggtggtactataagtgtgaaaagtgtaaaaaatagagggacgaccttttgttttgatttattactagataaatcagaacaatcagtaattcaaatgcctcctgattactctatatttaaaggtaaacgaatattagttattgatgattatgagatgaatcgttatatagcaaaagtttatcttgaagaggttgggtgtatgattgatgaggcggaaagtttagagtcggcattaagtatgcttataaataatcggaaggcatacaacactattttgattgattaccaaatgaaggagataactggttttgagcttgttgaaataatgaaggaaagaggcttaataaatgacattccgttgatactattaacttcagttaccgcaaattctgaagcaaggatagcgaaggaaaataaattttctggatatatttcaaaaccttataaaaggggggatttgctcgattgcgttgcaatggtgattaaaggagatggctctaaaatatataataatgatgtttttataacaaagcaaaatgttgaagaagctaaatataataaaaagataaaaatacttttagtagaagacaatgatataaacataaaattttttgttaatagtttaaaattgaatggtttgacttgtgatattgctattgatggggcaaaagcgttaaaagcatgtgagaacaaggaatacgatataatttttatggattgtcagatgccagttatggatggctatgaagcaacaagaaaaattcttttgttaagaagttataaaaatgttcctgtaatagctatgactgcttattctatgaaagatgacgaaattaagtgtttggaagcaggaatgatcgattatttaagcaaaccttttactgttgatcaagttatggaaatgttagaaaagcatgtgaaaaatattcataatgatgatatgaatattttaagtgatttaaatgaccatggttttgagatgaatcaaagtgattattttactgaaatagtaaaaagtcttatagaggaatcgggatttgatgaacgtttttgcacagaattgcttgaagaattttgtgagcaatcaaagaaaattctgagtcaaattaaagaatgtatagatcaaaatgatttaaatgaatcatgtatacttctacataagctaaaagggtcagcaggtactgtaagagtcaatgatatagctgaatttgcgttacaagcagaaaatgctgcaaaaaatgatgataaagatttattaatgaaagcagtctatagcatggaaaaaacgctaaaaaacttgtaatggacaatgaatgaaaactaaataaaaacggtaatggaagaatttaagaaactattagtaatttgggttgtgatcagttgatgcttttattaagagatgcaataattgaatgtaatggcgtttgtgaagaatattttagatgaaattgattttttgaacaatttagctatatgtaatttggattaattacatatagctatttttttgcaaatgtacatgcacttttcaattagggcattaacttagttttaataagaactcataaattttgaaactaatccccaaaaagctaattgaattaaaaaatgaactaattgtaaaaaaatatattgcaagtgctctgtaataatagtagtattaaataaaggtattgtatataaaaaaagtattaagaggtctaatgtggaaaaagaattatatacctggaattaaataatctatctatcaattaggaaaaattaaacattaaaatttgaaaaaatataaaagtatttaatgttattatagggtgggggaatgagaagaatgtgtaatgagtgttatttaagaagtagtgtggaaaaatggagacaaagattagatagtatgattattaaaaagaaaggtaattttttggatgatgagataattgctttgaatcaatatgttggtgatttgattgctgagtgcatagattgtaatgcttttaagttttataaagctggcagaagaaatactgttgtaggtaataagcaacgagatgtgtattattatggggactacaatttgtttattaatttgtataattatatagaagaaggtataagaaatagtgaaaaagttcatatttctattcagaaaaatctctacaagaaattaaaaaatttacttataattaatggaatttctattgaaaaggtgcaatttatatgtatagaagacatgaaaaaaattattcgtaataagagtaattcaattagttttagtgaagaaataaaaatgagtgaaaataagggatataataaaaatagatggataattcaatcttctttgcaaaaatattttttacagcaggaagattattggaatcgatataatgaaaagtttaattcaagtattctttgcgtacatgatgcttctctatatatacataaaaatgtgcatttagaattaggacgtgaattgttaaataaatatcaatatcattctaaaaaagataattatcaagttgggatttgaaatttatatttttagagcgtttaacatagtacaaaaaaaagtaggcagttaattctaactgtctactttttgtgcatagaagtataaaaatatacgtttgattaatattttacggatggaaggatagcggtgagaatctcttttagtacatataaatccttctcatgagcatgatttattatatctatcaagtcatctttattaacattaagggctctttcgccataaactaaaaagtccaaagaaatatgtagagttgaagcaatcttaattgtagttggaagcgacgggtgacgttgtcccaattcaatctggcttaaataagttggagatatactaaccaattctgaaaacttttctctagttaagccgttgcgttctctttcagcctttatacgttttccgatatctatataattaatattattcaagtttatcattcctttttttatataactttatattttaaaggcaaataacaaaaaaagctatttgagttcgtttatgaaaattaaaacatatagttttctcacaaaaatactattaagcacactaactaaaatacatgtgcttttgaagaaattaaaagaataaaggaatatttaacttgggaaattctaattgaagcagaaaatctaaatgatgttgtcccaatttaagttagcttaaataagctgtttcatcaacttatttaaaaacaatctttagttattccattaagtttcctcttagttttttatacgttttctaatatctgtgaaatcaatatcatttaatttatttctctttttatataactgtacattcttaagtaatacaacgaaagtagctatttgaattaatttataaactatttgcaaaaaaatgttgccagagaattataaaaatagtactattaagttagggtataaaatcaataaaatgctattaggagggtattatggaagaattggaagttaaaatagaatctgttagagagtatctaaacaaactagttggtgaaggagatatttgtagaaatgatgagataatttgcattagcattaaattgaatcaccttattaatcagtactacataagcaaaaaatactagtttacataaaaagatttttagtagaattaagctttgaactaattaatattaaattataaatttaatatgtttttataccttgcatttttattaaacttatttattaattttaatttatatatttagataattctaatccaatataaggatgaatgtcaatatatgagggagattaactttttatactatgttcttaatatatatttatttttacatatgattatatattagacgagaattgttaatttcttaattaggaaatgttaaaagtgggttggtgattttggggaaaataatatatcgacgaaaacggtacgtaatactaaaaaagaggggttatgggaggcataaagatgaaaagtacatacgcgagagatattgttcaattactagaaaaaactaactataatgaagtgatggtcattagaagtaaattatcagatgaagatattgaagttataaatttttttgctgatcaatatcaaaagaatgtaatgtttgcttcaatgcatgaagctttatttaatgaaaatgataatccgttagttttaaagtattagatttattttgattgaaaaaagaatatttataagagggtgtaaaattatgtggggaattttagaacaagataaaaaagagttgagaaaaaatttaaattgtagaatttgtccttcgatttatgaggagattaatggaataaatgaaggtgtagtaaaagatattaatcaagtaaacattacggaggaaaaaattatatttgatatgatgaatagacgtaatacgcgtaaatataatcataagcatgatgttaaattgtatttgctagtttgatttgataatcttatattaaaaatttaaatgagataattctattcaatgttatatgggtattaatatattgagggtagcatatgagaaatggtatttatatatgaataatatattgcttgcggtgaaaatatagtgtgatcgatgaaaattattatgtttttttgaaattaaataaaaagtatagctaggtataaaatatgcctagcttttattattactgtaatgaatattgattaaatattaaaagtgtagtatcaattttggattatctattaatgcaattttatgaaaaatgaatttatatgtaaaaggataaatgattatagaaaaaatcgtattacaatttaattttaataacgacaaatagatacaaataatattataaaaacatggacgtgaaaagaaaaaacgcagaaaaaagtgaataaatgacgaaaaaaagaaaaaatatcatgatgttaaaagaaggtttttaagtgtattttatagaaaagtttaattacataaaagaaatgaatttttaggaaggtggttgactatgggattaatcaggctgagatttaaatagggatattatgagtgataaaagtaattcggaattttaatatgggaaaatatgtataaggggtgaaaatggatggacttaatatgggataaaatgtggtcagttggtgttgataagatagatagacaacacaaagaattgtttaacagaattaacttgcttgtatgttctatgaaaagtgcaaaagggaaagaggagatgattacaactttgaattttcttgaagagtatgtaattagacatttcaacgatgaggaggaaattcaaaagaaaaataattatcctaattatgagattcagcataaagaacatgaaatttttaaaaataatttaaaagaattgagaaaagtgttcgaaacgacaggtgtatccacactatttgtaataagcgaacaacaaaaaatgtcatattggtggcgaaaacatgtaatagaattggataaagatataggcaagtttcttatgaatgtttaaatagactggttatggaatcttaaaggaattagcaaaataagatttatagcagattactgtggtagatttaaaattgggtataatacaattgggtttatgaagggtggaagtatatggttcatttaattaatgatatagaaattagatctaagcatacaagagaaaaatatagcatacaagttggaaaaattaaatttgatttatcaaaagaagtaagtcttataaaaaatcaattgaattatgggaacgaagaattcataaatattagattaaatacggaggaaataatcattctttataatggtaaggataaaataagttatgataatgtaaaaccgtatattattgatttttatacgcttcttaacaataaatttgtagggcattgtgtattagataatgcatacatagagtatgataatgatatttcgtattcaaaggtaactcaattacatttaaagacgggagttaattcgcaattaattgttaagaagcttttaatatgatgcgaatgaagttataaagtaaagataaaaatatttagcacatgaagtgctgatgtttaatctttatgttagcagagaaaggtagagattatgaaagatttcatgaaagattttaaagtatctacatttatatttttgtttgtaattatgcttataattaatattttggttatatatattacgaattaataatttattgaatagactagtatcaaaataggagcaaattcttatgatcaattgtagattttgtaataaacttactgcttaataagttaaggagatttattggggctgagcgtgaaaaaaagtttaaaaggaattaaagtatcaagacacataataacgttatttgctaagtaatttgggtgggagcgatgaaggattattagaaatattaaatatattcaatggttaagaactaaagaagaagttaagtgatgttgatgatgagtatagagatagaaaagattttttgctgtaagatagattacggaaaagatagttgataacgtctaattttaatatgggattctatcaatatcttttctaactgctatatagtaaaggcaactatgtttaatggagtgagagagatgaaatatgaggaatattttgaagaagtatgctcaagtgatatgagtgattggtgttatgaggatgatataggagtatatttgtatagaaataatatcgatataattataaaaaatgatataaaatggcttgaaaatagcgatgatacatgttatgaagattggacaagtatttttccaaataaacatgcatataataaaaggtttattcttaaatatagggagcaaataattaaggtggtatatggcgtttttgtagatgcgtgtacatgttttattcctttcccggataaaaaaatgaacatcacaaagcaacaatatgaaataggaaagattattaatagttttataacttcagatgaaaaattcgaatcttatttggtaaaagctaatattaatgttatatcggaatgattaataaagttattttagaaattcattaatttattttcattagattagggaaattattacgcaataattttgataaataggtttatatttagaatactaggtaatcctagcgaattaattaatggcaagatgtataaaatttaattctaatatatattttgaaaaaatatttttttaaaatacaaaataagacaaaaaaattcgataagttgtgataagatttatttatagtatttttactagtgcgttagtttgattaaaataaaaaaataataaagaagaattaaagagaggtgaatgctttattgtgtaataataactaattatttgtcaaaaagttaagaaattatataaaagagagtagatactttttatatgaactgatatctcaatatatatgaaaaaaagaaatgtaaacgatgcttgattctaaactaatccaccagtagtgaagttttatggctgattttaatgataaatattaaaaggagctataaatcagtaagtatatttattataaacagagagcaggtggaatttatgagtagttggcttgtgaatttaaattcaaaatttgcagaagaatttgatataagatttgatggatttatcgttaaagaagaagaaaaagaagaatttttaattaaaatgaataagattgcacaagaagttgttgagctaactgatttaaagttgaatgaaatagatctatttgagtgtaaagaaattaaggaaaaatgtctttaataagtgtttattctgtaatttgatcgtgtttctaatgaaattaataaaatgtttataaggatgatgaacttatgtcaacattaaagaactatgaaatttattgtgaattcacagatagaaaagtaaaagtaaaagaaaattatattttaacttgtggaaagatatttcctataagatgttgttatgtattagatgatgaaagcaatataaaagaaataatacatacttgtaagtatcgtgataatggtgagtgtgttttaacttaaaagaattataacaattctgatattcagggggatgagatgagatggatttagaagaaaaatacaaagatataattgaagcatacacaagaacaactaaggaaaatgatgaatttgatgatggaagttattcttatagaaaaaacaagtttaagagtaactttgaatatggggagtttaacaaggataatagaaagcttaataagagaaataaaaataagaattggtcttaaagggttaatttatctgtccatattatttgttgttacatatacagtgtattcgggactaaaaaatatacagctataagcagctccaagttagaacttaatttggggctgctttactaatatttcaagtgaatcaaatattgattttctagcattctaatgataaaatatatttaattgtattaaaattataaatatatatgttgcaattcacaatgcacatcttacaattacgactaaaattcttacaatatttttagaattatgatgaagaattatttttgcaacgtatattatataaaaaatgttgatatgggaactttaagtagttcctttttatataatggttttaagtatttgaagttgggtatgtaaccgatcaactggaactaattaatccttagtcatgattgatttgttttgtttaaagctttgaatatgagattatgtttttattatagttatataattacaaagaagcgatcgtaactataataattagattaatatattaaaatttgcttatttatagaaaacatataatgagatagtagttatctggtttttgctatgtctttatcatatgtttttatttatgcgcattattatatttataaattatttagataagtataacagttaatatttagaggggattatagaaattatgttcatgaggagtaaaaattttgtatattcatattgaaaaatagacattttaaaataaaaattttaagggtatagattgaggggttaagtaaaattgagaaagaaatatgtatatttactatttgggttaataattttattagtattttctataggttattttaagaacaaaagtttctataataaagcgcctcaagttgaaaatggttttattgatctttcagattgggattttaataaggacggaaatgtgaaattagatgggcgttgggaattttatcctaatgaacttttatcgccctcggaaattaataatgaagttggtttacataagttttatatcaacactcctggtccatggggaaatcaaattccaaatgatgtgatatctgataaaggaattggaacttacagagtaaaaattaagataaataaaagtgttttaatgtatggtataaagactacacatatacggtcagcaaacaaaatatttgtgaacggaaaagaaattggacaaagaggtgacccaaagccaagctttgaggaaggatatttttcagatattcaacggaatgttgcatgctttaagccagaaggagatactttagatattattattcaggtagcgaatttagattattttagtgggggtataatccaaagtgttttctttggagattatgaaaaaatattagattactatataatatttattgtattagatatagccaatatattaattttagggatttttggaatgtattatattggaatttatttgaaaaatattaaacaaaagaaatttttatatattggaagtgtatgtataatttatgctttcatttcatcaatggtaaatgaaaagatatttaataaaattttttcgtttatatcatattccgaaattttgaagataaagttagcattaataagcttaagcatatatattgtgctcttacttatacgacaatatggcaatgattttattactagaaaaaaaataaaaatagcaaagtatataatttttactagtatctttacagttttgctgatgccaatggagtttatggaattattggaaaatataactgatacaataaatatattaatttgtgttttcgtagctttttcaattgtgaaagcaatttatcataaaagatatggagaattagggaaaaaaggaacaatacttttgctttgtggagttattgcagctttaactcaatattggatttttatactatactattgctcaataattaggagcaacgtaattccttttattacatactttattttattattggcggttttggttattattttaaaacaacatataaatgcatataataaaattcaggcaataaatagcgatttaatatcattagacaagttaagaaatgaatttttaatcagcacttcccatgagtttaaaactcctttgcatggaataataaatattgcccagactattttaaataaaaacgatagaaacacaacaaaggttgatgaaaatttagcatatataatatccacaacgacaagattatcaagccttgtgaatgatataattgacttccaaagtatgcagaatgaagatttgaaggttaataaaaaagtatttgatattaatggtgttgtacaggcagtgtttgatattttggcttatatgagaaagaatgaagagatacagttaattaatagtgtgccaattggagaatattatgtttatacagatgaaaataggtttaagcaaattttgtttaatcttatagttaactctttgaaatatactgaaaatggatttattaaaattaaagctgaagtagcagaaaagaattatattaatataacaattgaagatacaggtataggcattgataaaaagtatcatgatgaaatatttgaaagaaacattgacatagataaagatgtttttaatggaatatttccgtctgggcttggactttctatttctaagttgcttgcttctagaattggcggggaactgtatctgaagtggtcagaaccagataaaggctcaatatttgttgtaaagatacctaaagcaaacgaaaatagttatgtcattagacaagagcaggatattgaaaataatataactactttaaggagtgatgaaaaacttagtgctaatatattgtgtgaaccaactgaaactaaaaacaatggagaaaagctaaagattttacttgttgatgatgatgtatgcaatatcaaagttttacaagaaatattttatgacagtaattatgaaactttagttgcatataacggggtaaatgccttagaattagttaaaaaacataaagatatatcaattgtattacttgatgtaatgatgccaggattatctggctatgatgtgtgtaaaaggataagaaaagagtacaagctatttgaacttccaatattacttttaacggtcagaagtacaccagacgatatagcattaggttttgaagcgggtgctaatgattttttaaccaaaccttttaattttatggaattaaaagctagagtaacaactcttcaaaaaatgagaattgcagtaaaagaagctttgaaaatggaaactgtatttttacaatctcagataaggcctcattttttgtataatactttaagtgttattgtttctctgtgctatagagatggaaaaaaggcaggagagcttcttggagaattaagtaaatatttacgcttcgcctttgatatagatccctacaattcgtttataagcttgaaggaagaaatgtcttttgtcagatcttatgtgaaattagagaaggctaggtttggagaaaggcttgaatttgaatttgatattgatgaagagtgtttgcaaaatactattccagcattagttatacagcctctagtagaaaattcaatacgtcatggcttagtgaaacgcatttctggcggcatagtaaagatatctattaagaaaagtaatgattatattaaaattgtaatacaggatgatgggataggtatagatgctgataagttgaatggattattggacgatagcgtgtccataaatagtggattgaaaaatgttaacaaaagacttataaatgagtatggacagggtataattatcgaaagtaagatagggcaaggaactacttctacaataaatatacctctgaaattagatatataagagcaagggatgaagttatgattaaagcaatggttgtagatgatgaaactttaactaatgatcatatttgtgaattaattagggatacaggtgctgaagttgagggatatacaaatcctcatgaagctcttgataacataatgcgatttaaaccggatgtgttgtttttagatatagaaatgccagaaattaatggtttgcagtttgcagaaatagttaattcaatagaatatgattgcgagattatatttattacagcgtataatcaatatgcaatcaatgcatttagagttaatgctatagattatttgttaaagccaatcatagttgaggaactatataattcaattgagcgtgtgaaaaagagaagatttttgacttttagtgttagtccaaataaagaaataaaaatttctttatttggaggggtatctctatatataggagatgaaaagaaacctattagatggatgacagctaaaagtgctgaaatttttgctttcatgctcctagggaaagacgataaagaaatatctaaatggagattaatgaatgaagtatggccagataaagataaagataaagcagatattaatcttagaagtacaattagtcgattaaataaaacttttagggagaattctataaaaatttcaatcatatctaccggaaatggatacaaattactaatagcagaaccagatataagaatagacgcatttgaattagaaaacttagtatttagtataactgaaatagatgattctaacttggaatgctatgaaagtattatacttgattataaatatatgcttcttgaagattttaatagtgattggtgctattttgaaagagaaaattatcatagatattttttgaatggagcacgtaaacttgtaaaatattataaagatattaatgctgagccaattaagattttaagacttgttgagcttattattaaatatgaaccttatgacgaggagatgagagaaaatgctttgatgtttcattataagatcggtggaataaaaaaagcagaaaaatattataatgagtattatgaaatgatggaaaatgatttgcagatggagccatcagcagctgtaaaagaattatacaaatacattttagataactagctaataatttttatgataagtactataagcgtttacaaatattggacaatatttgactgttatgcataatttaaataataattcatattatataataaaaataaatactacaagaaagattaaaaatatacatcatttacattttcaaccttttatttatttaatttctaaaaataataatatcttgccacaaatttgcaacaatatattgtgtagaataaagttgtaataattctttttataaacaatattttttaaattaaataacacagggggtaattatgatgaatttattttcttcaacttcttcttcatcaaatggtctagagagggagaggctaaaactgatattagtacatgataaaactgatatatctagtgatgttttagattctatgagagaggaaatactagaggtaattgatagacatataaaaacagaaaattcatgcaaaaaaatgatattaacacaagatactgtaaatatagataattattcgatattgattgctagtatacctatgaaataataaatagaatatgtaatgcatgtgataatattacagatataaaaatcttattaaaaagaaaatatactggagtttttcatgcactgcgaacagatagtaatttatatgttgcatcgttcctaatttcagtacttgagcaataattaatattgtataagtgtaagtgatttctataggcaagtagataaacacttacgcttatttttttatagtatgttggaagtgacagcaaagtggtatataatgatgaaaaagcttatttaatgttttaaattgaaagggaggaataagaatgtcttatttattcgtagagtatccaaaatgtacaacttgcaaacgagcaaaaaagtggctcgatgaacatcaagttgaatatgaggatagacatatagttgataacaatccgaaaatagaagaacttcaagaatggataaagaaaagtggattgccaattaaaaagttttttaacacaagtggaactgtatataaagagatgaatttgagtcaaaagcttaaagaactttcagaagaagaacaagtaaagcttttatcaacaaacggaatgttggttaagcgccctattgtagttggagatgactttgtacttgttggttttagagatgagagtttgtgggaagagtcacttttgaaaggctagattagtgattaagtgataataagaaagagatatttgaatttaaataaatatctctttctttatttttgtggaaattatcaaagataataacttatagagattgaagagtaatttattatatgctctataattatgcaagctaatatgtagtatgttaaaatacatcaataaaaatgattaaatttatcactaaaattaatatttaaaatgtgctattctatatatcataaagcaaaaggcaaaattttcataaagcgcataataaaatttattgattaatgccaaaatagatataattaatattttaatagatatatgtaagcgcatttataaaattgctatattggggagtgatagggatggaaaattttgaaaaatataaaagaatgtattttatgccaccaaaagtgacatacgattgggtgaaaaaagattatatagataaagcgcctagatggtgtagtgttgatttacgcgatggaaatcaatcattaattgaacctatgagtttagaagaaaagttagaattttttaatatgttagtaaaaataggttttaaagaaattgaagtaggctttccggctgcttctgaaactgaatatcaatttataaggacactaattgagaaaaatatgattcctaatgatgtctcaattcaggttttaactcaagctagagaacatatcattagaaagacttttcaagcggttaaaggggctccgcatgcagtaattcatttatataactcaacttcagttgcacaaagggaacaggtttttggtaaatctaaggatgaaattaagcagcttgctgtaaatggggcaaaacttctaaaagaaatagcaaaagaagaaaaaggaaactattcatttcaatatagtccagaaagttttccgggaacagaagtagattatgcggtagaagtatgtaatgcagtattggatgtttggaagccgacaaaagaagagaaggcaattattaatattcctacaacagttgaaaatgcaatgcctcatgtatttgcttgccaagttgaatatattcacaaaaacttaaagtatagggaggctgtaactttatgcttacatccacataatgatagaggaagtggagtgagtgatgcagagtttggtatacttgcaggtgcagatagaatagaaggaactttatttggtaatggcgagagaacaggaaatttagatattgttacagttgctatgaatctttactctcatggtgtagatcctaatttgaattttagaaatatgcctgaaatagttgaaaattatgaaagattaaccaatatgcaagtgggtatgcgccaaccatatgctggtgaattagtgtttactgccttttcgggttctcatcaggatgctatttcaaaggggataaagtggcgtgaaaataaagagtgtgagtattgggaagttccatatttacctattgatccaatggatgttgggcgccaatatgattcagatgttattcgcattaatagccaatcaggtaaaggtggagtggcttatatattacaaaagaatttcggaatatcacttccaaaacagatgcaggaagcatttgggtatacagtaaaggatgtatcagataaggctcatagagaattaacaccagaaggaatttataaaattttagaagagaagtttattcgtaactcccatgtatttcaaattccagaatgtcattttatacaaggagaggagatggcagccgatactacaatttgtcatggggggaaaatacaatgtataacagcgcatggaaacggaagattagatgcagttagcaatgcaattaaacagtattttgatattgattatgacttagatgtgtatgaagaacattcattaacaagagggtcatcatcgaaagctgttacttatgtgggaattaaatgccataataagctttattggggcgtaggaatagaaaatgatattattaattcatcaattgcagctttagcagtagcagttaatcaattagaagagattaagaatatgaaaagatcagatggtagaatgacagaggtattaaattatattcaatcaaactataagacggttacattagaaaagctttcagaaactttttacttatctaagccttacttatcgaaatatattaaagaaagtacaaatagtacttttgtggatatagtaaaacaaattagaatggataaagctaagagcttacttaaaggaagtggaatgacagtagaaaatattgcagagcaagttggttatgaaaatgtagagcattttattagattgtttaagaaagcatatggaataactcctgtagaatttagaaataatatacctaagcgaatggaacaataaaataataaatttgtctttttgtaaaaaagatttgatgaaaaaatatagactaatatgtcatactatggtatattatatacataacaaatgatttgaaaaaactaaagatttaaataaactaaagatatttcgaaaagagatgactatagatatggttatctcttttcttatttataaaataagaggcaaaataattataaaacttagataaattcttattttagcactataaatatattaaaagcatttgtcgaaaaaaacctgataatcaatatcaaaaaatatagattattttttaatattgtgttaatataaatgtatacaaaagatatccaaaccccactcttaatctcccctaaattttatataagatacagccataatttggctgtatctttttgcgtattcagttaagagatatgttaataaaccataggtcacctaatcaattaaaaggcgactttacaacaattagatgatgtttacaatatatgctataatttagcctagtagtagatatagatttaaggatgtctttttaattattatttaaatgcttacacttggaggaaagaatatggagattataaaatcaatattatattttatattggctggaatatttgaaattggaggtggatatcttatatggatatggttacgcgatggaaaaagctatttatatggagttataggagcggtcatattaattttatatggaataattcctactttacagccttcaaatgctgattttggtaaggtatatgcagcatatggaggaatatttattgtaatgtccattttatggggatggaaaattgataatatagtacctgataagtttgatttaattggtggatgtatagctctagtgggtgttattgtaattatgtatgcaccaagaggatagtagagtgtgttatgataaaaattcgtatataaaaatcaagtgtgaagagtttgaaaaagctttaaaaatggaaatactttaagaaaaatgtaatggatgattattactaatatttgaattaatataaaattatagaagggaaatataaacttttatataattatctatattaaggggatgagttaatgaatcaaaatgtagatataatattagaaataataaaaaatatgccatgtgaaaatatcgaaggtgttaatgttcctaaatctttgggatatgagcagataggaatgagtattgatgaatttgatgaagcaatcaagtacatacaagataatgatttactgaggaaaatagttcctatatttaaagataataagatagtactaataaagataatgtaaaatcatactggatttttagaaaggcggctaatatgactagtaaagaaatagaatttgttgatttaactaaccaacagtatgaagctttgattaaaatgcaaatggaatcatacaaaaaaatattggatttttgcagagaaaatataagcgattcagagaaagttgaaattatagataagaacttattaaaaatggatgaaaaaataataacaaaattagaggaaatgagagtctataataaaatatttatggaaacagttaagtaagatttaatatttttagaggaatttctccttttttgtataattattattatggaaagaggtgaggatatggaatttaatcagaagtcatggattgaaaactatgtacatagcttatgcccgaaaaaaattagtaaagaaaatgtagataaagagataaatagcataataactttaatgaatgagttatttagtagtagaaatgcagacaagtatgttgaatttgtcccagatgaaaatgctataatattcccaggtagaaaagcaaatatttttataagatacagtgtagatggaaatggtaatgaagtgaaaatatcaaaacataaaaatcgtgaattaagcagtagtatagaaaaagcaatattaataagttgcaaaggtgaagaatatgtagtaaaagatgaaccttcgataacaatggacgaaatgtcatttgaaggtttgaaagattctattaattatgcattaagcaaaatattaaactaaacatatgtgtaagagaacgcaggatagggttctcttacacatatacttttattttttagtaaaattttaagaaaacattttcaattgacaaaaaactgacaaaatttaatggtaatatatatattagaaagtgtaaatgttgtcaataatgtattataggcaatataaaaaatttttatattgtgtgataatgtttacaaaaagtcataaagttttaattatttttgtataaaaatcacaagaatttaatattatcatatatttaaaagaggtgagaacaacatggggaatataattaaaattaatatgtacgctgaaatgaacaaaaaaaagaatgttaagctagatttaaaaacagtagaagaagtcattttagaatataataaatggctaaagaaaaacaacagagaggataaaatagagacttatgaaaagtttttacaagtataattatctttaaaggtagattgagtgataacgcttaatttacctttttttatttttatgtagaaatatagataagctaactataatccatacttatgcgtatacctcaacgaaatcataaatattttgattccgaaaagctatgaaaatatcgctgaaggttctaagccgcaggttgtatccactttagcatgctccaactttcctagggaagctcgactcattacattcgctgaggaagttcgagaacccaaaataagattttggactctcacttcacaagctaaaatggaacaacctacagcaaagaacctttaacagctcattttcaaatgttttcttcacaaatatatttatgatttctagtgaagatatgagcttaaagttttagtgaatttgtaaagacattcatctaataagttgaattcttatttcggcgagctatatgcataagttcaggtcttagttggtttgtctataacaggggagttaaatctgatagatttaagatttttggagtttattgtgagttaatgtaaagaaaactctattttatgttaaaatataagtagattttaaaagtgtattttggtaaagggagagaaaggtattaatatagaataaaaaaataaattattaaaatatcagtaaataattatagagttttagtaaataagtgatgaaaatgaaaaaatgtatctaagaaattgtattgagatattaaaagattaggtagatttatgtgaagataaagaattttactaaagaatggaggtacgttatggagaataaagaactattaattgaaaactcacataagagaagcgaaagttatggagttgaaaaaaattcagatcattcaaataagattcttactggtgaagaattagaaaatatattaactattaataaagaattaatagaagtatctaaaatatacatagatatggtattttcagcagttatggataatgaatttattatagtgttaacagataaaaatggatgcattctatatattaaaggagcagaagaaaataatagtaagcttggggggaataatcttgaagttggggcttatatggacgaacaaaatataggcactaatgcaatgggaacagcaattaaagaagacaggtgtattcagataactgcaactgagcattacataaaaaggtttcacaatttaacatgctctgctgcacctattcataatacaaagggagaaattattggaacattgaacttaacaggtagaagagatatgaagcatccacatactttaggtttagttgtttttggtgtaaaggcaatcgaaaatgaattggacaagaagggtatacgggatatattgaatcaaacctataactatatggagagcgttatagataatgttgacaaaggtattatgatagtaaataaagagtataaagtaataaatataaataaacttggagtagagatatttaatatagataaggatttgataataagtcaagatatacattatattttgcctgatttgggaaacgtaatagaagaacttgaaaaccataatgatgatattataaaggaattaaaattaaagcatacaagcagacataaaataaggttggtttttaaagggcttaaacataaagaaaatattataggtatggttgtaacaataagctatgaaaaagaaggaaaagacaacaaaaatgcaacaggggcattttttacttttaatgatataattggggatagtgcagccattgttaatgtgataactaactgtaaggttattgccaatagtccttcaactgttctaattcaaggagaaagtggaacaggtaaagaaatattagcacaggctatgcataattatagtgtaagaagaagaaataaatttgttgcaataaattgtggagctataccagctaatataatagaaagtgaattatttgggtatgaggatgggacttttacaggaggaaaaagaggcggaaatccaggtaagtttgagattgcaagcggaggtactttgtttttggacgaaatcggggaaatgccaattgatgcacaggttaagctgttaagagtacttcaaaatggaagagtcacaaggcttggtggaagcagagagattcctatagatgtaagagttatagcagctactaataaaaatttaaaaagagaagttcaaaaaggaaattttagagaagatttgtactatagattatgtgtaattccaatcactttaccgcctttaagagagagaaaaggcgatgtaaaaatgcttattgacttcttcttaagaattaaatcctttcagctgaataaatcaataccagagattgataaaagtttatataataagttattagactatgattggcctggaaatataagagagcttgaaaattatattgagaatatagtaaatttggatggacgatcatcttttaatttatgggaatttgaagataatcaaagttttgagacagataaaacatatgatagaaaaatattaaaagatggctttttaaataaagagatatgggaagatgatcagactaatggtttacttaagaatgttaatactgaaaagactgagtatatggtaaatactttaaatctagaagaactagaaatgaaggcaattcatgaagctgtaagaataaatgatcataatatgacaaaagctgctaaaactttaggtataagtagaaacactctatacctaaaattaaaaaaacataaataaattataaagcatgtcctaaaatattacgctgtattaaatttatactgtattattttaggacatatctttgttaaaaattatttatataaatgagtatatgcttaacaatcaatttatgtataacttattatatatatatttaataacttaatttaaaacctttaaatataatatttctgaggaattacgagttttttgttagaaaagtattcctgtattttgacattttattatcataaatataaaatatattgataaaataatcacaagttggcatgaatattgctttgataatttatgtggtcaaaaatagacatattaacttattattctgcacttgtgcaaaataatgaatgagcaaattttaggaggaaatatttatggcacgttttactttaccaagagacatttatcatggagaaggagcacttgaggcacttaaaactttaaaaggtaagaaagctttcttagtagttggtggcggatcaatgaaaagatttggatttcttaaacaagttgaagattatttaaaagaagcaggaatggaagtagaattatttgaaggtgttgaaccagatccatcagtggaaacagtaatgaaaggcgcagaagctatgagaaactttgagcctgattggatagttgcaatgggtggaggatcaccaattgatgctgcaaaggctatgtggatattctacgaatacccagattttacttttgaacaagcagttgttccatttggattaccagaccttagacaaaaagctaagtttgtagctattccatcaacaagcggtacagctacagaagttacagcattctcagttatcacaaattattcagaaaaaattaaatatcctttagctgattttaacataactccagatatagcaatagttgatccagcacttgctcaaactatgccaaaaactttaacagctcatactggaatggatgcattaactcacgctatagaagcatacactgcatcacttcaatcaaatttctcagatccattagcaattaaagctgtagaaatggttcaagaaaatttaatcaaatcatttgaaggagataaagaagctagaaatctaatgcatgaagctcaatgtttagctggaatggcattttctaatgcattacttggaatagttcactcaatggctcataaggttggtgctgtattccatattcctcatggatgtgcaaatgctatatttttaccatatgtaattgagtataacagaacaaaatgcgaaaatagatatggagatattgcgagagccttaaaattaaaaggaaacaatgatgccgagttaactgattcattaattgaattaattaatggattaaatgataagttagagattcctcactcaatgaaagagtatggagttactgaagaagattttaaagctaatctttcatttatcgctcataacgcagtattagatgcatgcacaggatcaaatcctagagaaatagatgatgctacaatggaaaaattatttgaatgcacatactatggaactaaagttaatttgtaagataaataaaggcaatttttttagttcataatcttatagagataaagtacgttgttttacattaaaaatcatataactttaaaaaagttattgagataaacaattgaataattattaaaagaatcgttacaacattaataaaacaacaatggctctcaacctcagagagtctttgttgttaatatggcaataaggatgaaaattccaattatctgatttagctgatgtctggaagctgtaatacactgacttcttttagtgagatgcaatagctacatgactatagataaagctcagctaagattaagatcaagctctatctaagcaagtttaatttgaaattatcaatagaatttataagcgtagggggtactaagagtgtacaaaattgttaacaaaagagaacttacaaataacatattcttgatggatatagaagcgcctagagttgctaaatcagcaaaaccaggtcaatttataattataaaaaatgatgaaaaaggagaaagaatacctttaacaattgcagattataatgcggaaaaaggtacagtggctatagtttttgcagctataggaaaaggaactaagcagttagcagcatttaatgttggagattatgtttcggattttgtaggtccattaggtgtaccaagtgaatttattcacgaagatctagaagaattgaaaaagaaaaatattatctttatcgcaggaggcgtaggagcagctccagtttatcctcaagttaagtggatgcacgaacatgggatagctgtagatgttattttaggaagcagaaataaagatttattaatatatgaagaagaattaaaggcagttgctggaaatctttacgtgacaacagatgatggttcgtacggctttaaaggaactggttcagatatgcttaaggaattagttaataatcagggtaagaaatatgaccaagctgttatcattggaccaatgataatgatgaaatttacttcaatgttaactaaagaattaaatattccaactgtagtaagtttaaatcctataatggttgatggtactggaatgtgtggtgcttgtagagttactgtcggaggaaaggttaaatttgcatgtgttgatggacctgaatttgatggacatttagtagattacgatgaatcaatgagaagacaagctatgtataaaacagaagaaggaagagaattattaaaacatgaagaaggaaacactcataaccatggtggttgtggatgtaaggaggataagtaatagagatgaacgatagaatgaaaagaacacctgttactgaacaagctccagaagtaagagcaaaaaactttaaggaagtttgtttaggatataatgaagacgatgctataaaagaagcaaatagatgtttaaattgtaaaaatcctaaatgtgttgagggatgtccagtatcaatcaatattccaggatttatatcaaaggctaaaactggagattttgaaagtgctgctaaagaaatagcaaaatatagtgcacttccagcggtttgtggaagagtatgtccacaagaaaatcaatgtgaaggtaactgtgtacttggaattaaaggtgaagctgtagctataggtaaattagaaatgtttaccgcagactggtcaagaaaaaataaagtagatttatcacaaacagaaccttctaaagggaagaaagttgcggtaattggaagtggccctgctggtcttacttgtgcaggagacctagctaaaaaaggttatgatgtaactatatttgaagcactacatgaagcgggtggagttctagtttatggaatacctgaatttagattaccaaaggatgatgttgttaaagcagaaattgaaaacataaagaagcttggagtaacaattgaaactaatgtaattgtaggaagaacaataactatagatcaattaattgaagatgaaaattttgaagctgtattcattggatcaggagcaggtcttccaaagtttatgggaataccaggagaaaatgcaaatggtgtattttcagctaatgagtttttaacaagagtaaacttaatgaaagcttttaaagaagaatatgatactccagttaaagcagggaaaaaagttgctatagttggcggaggaaatgttgctatggatgcagcaagaactgctttaagacttggtgcagaagctcatatagtatatagaagaggtgaatcagagcttccagcaagagcagaagaagtgcatcatgctaaagaagaaggagtaatatttgatgttttaactaatccaacagaaatcttaacagatgaaaatggatgggttaaaggaatgaagtgcgttaaaatggaacttggagaaccagatgcttcaggaagaagaaaacctgtagttaaggaaaattcagagtttgtgttagacgttgatacagtaataatgtcacttggaacttcaccaaatccattaatttcatcaactactaaaggtttagaaatcaatggtagagcttgtttagttgccaatgaagatggattaacaactaaagaaggtgtttatgctggtggagatgcagttactggtgctgcaactgttattttagcaatgggagcaggaaagaaagctgctgcagcaatagatgaatatttaagtagatagcatttaacatattatatattaagaagattagttacaaggaaatatagatgtaactaatcttttttgtttataattttagactatatttaacaaaagttattttttaaataaaaataatgtctctataaaaagaggaaataatcttaaaatttccttaaaaatctctaatttagtattcttaatgatattatttgttgattttattatagattgatgataatatttcatatatatgaaataagtacatattaatgtattatattacaattggaagctatgaagaattctttctaagtgggcactttaagagtttggagctagttgtgcaaccgaccaattaagattaattaattattttattagttagttttaattggttttttatgtgaaaaaatttacttgatttatatataaataagaacttatatatcttaagtttaagcattacgtaagtaagctcattgagagaagattttaatttttatcaatcacaattatactacagctacagtaagggttaaattaagaggtatataagtattaatgaaggggatgagactgttatggatatttttgtagctagacagcctatatttaacaaaaaaaatgaggttgttgcatatgaacttctatttagaaatggacaaaataatttctataacaatgctaatggcgatgaagcaactttaaaggttatagctaatacattttatacatttgacttcaaagatattactgataacaagaaggcatttataaattttactgaagaattgataaagaaagaaatagcaaccatacttcctaaagaatatgttgtgatagaaattttagaaaatatagaaccaaatgatgaaattgtggatgcgtgtaaaagacttaagaaaagaggatttatcttagcgttagatgattttgtattccatactaaatatattaaattaatagaaatagctgatattataaagatagatttcagaatcactacagggtgtgaaaggaagaaagtatttgaactaaaaaaaataaataataaaataaagtttttggctgaaaaagtagagaacaaagaagaatatgatgaggctttgaaattagggtattcatactttcaaggatattattttagtaaaccaatagtgctttccagaaaaaacattccgactaacaaagatacagcaataaaaattctaaagttaattaatagagatgattttgattttaataaattagaagaattaataataaaggatttaggtttatcatataaaataatcaaattgataaattcgtctgcatactgcctaaagaatgaagtaagatctataaaatatgctattgcacttttgggaagaaaagagattataaaatggttatatgtagttctgctaaatgatctaaaggaaaataacacagatgaacttataaaagtctcattgcagagagcgaagttatgtgaattaatatgtaatatgagtgagtataaaaataaagtttattcagcttatatggtaggattattttcagttatggacgcaattttaaattgttcaattgaagtgatcttaaaagaattatatatagatgatgaaataaaggaaggactaactgaaaaaggtgatttcttgaataaaatattaaaattagctattaactatgaaaaaggtcagtgggaaaatgttgagttttatactaaggaaataggtgtcaatgataataatcttgcagaagcctatatagatgccataaaatgggcagatgatgttgtgagttaaaaaataagaaactagaatatgtctagtttcttactctaattggtaaaaaaagaaaatactatatcaaaactctaggaaaaatttcaatataagtaaattgtatatttacattaacattatacgacataaactgttttaattcaacaataaaaatataaaaaaggtgcaaatggcaaaaaaaaataataatatattatttttcattggaatagtattaaacattaggataaatattctaaaattgctaataggtataagtaattaaatcaaaaaaatgataggagctttagaaactgatttttaatgtgaaaagagatagcagttagattaataaatgctatctcttttggtgtagttgaaaagtaatattttcactaataattatttgcgaaatttaaagacattatacataaaaataaaaaaaataatgacaaaataataatatctttagatttactaagtactcctttcagttataaagggataataaaatttatgattgataacaatgagaatatactttttatcagaaaaatttatgttttatgtcagaaaattatatttattaacgaataatatattgagtgtgtaaaaattgattcccatataccccttaatatgtggttacataacactcctatattttactatacctactaacagtaaatcccctgtaaattgatgatgactttacaggggatttctaattttatttaaatcataatatgctaaagagtagtaatttacaatacaaagatgtttcattcacaatattaatttcatctgattattatataataaatattattcagtagttaatatttattggattttacaccccattattaatacgaggtgaaattaatgaaaataaaagtgataaatagttaccctgcttgtatatgggaagaagatattattaaagcaattcacgatctatgtcttgaagaacttcaagaaaaactggcgaaatataaatctgataactcgagcaaagcaattgctaattgtcatatttcaaaaaaagagttttgttgcaaaaaacaagtatttatagaaatgacagcaatgtttgatattgttgatataataaattagaaaataatatttagttagagaattatactaaattaaaaacagtctcctattaaaagatgaggagattgttttttatttttggaaaattgtaatgaggttaagagtgtgaaaaagttacgcgggaatctattcaacaatattgaaaacaaccagtggatggaaattgaatccattttttctcgtggaacttttatcacatctatttttaaaggaaatgaaattaaacaatatgagaataattatcggattcatgtaaattaaatggattttgtggtataatttagagtagaagtaaattgcttattagtttttgatatttatgtaaaaataagtgattaagcttagtagtttgtagaatggttatggaattaggtattgggattaaacatgatagcttttatatcttaaaggacgaagggaaggataaatacaatgtttaagaaaatgaaaatatcccaaaaattaataggaagtagtgtgatatgtactgtattcttagttttagtcggcatagctggtctatttagcatgaacaaactaaatataaatacagataaaatttataataataatttaatgaggcttcaaaagttatacgtagtaaaaagtaatattaacttaggactatctgatatggaacatattattaatagtaattttaaaaatgatatagatgaggcacaaaaagatttagcagatttatctgatttaaataataaaacttttgaagaaattgaaaaaataccttattccagtgaaaaagaagaagctgattataaaaaagttaaagatgcattaactaggtatagtgatataagaacaaagataataaaggatgtaactgataataattatgaggaagctattacattatataattcggagtattttactttaagagaagagatagcaaatgatataaatgttgtaataaatgaaaatattgatgcggccaaagcaacatcggaatcaagtaacgcagtttttaaaaattcgtttaaatttcttgcaatatttattgttatttcagcattgatattagccatattaagtggtggattagcaatttggttaagaaagagaataaacagtatagttaattttgctaatggtttagcggaaggagatcttactgagaaaataaatataaatgcatatgatgaaataggtaatatgtcaaaagcattgaatattgctgtattagacgtgaaaaatcttattatggaacttactaatcgtatgaaaaatgtcagaatttcaaatgaagatctaacttcaacaatggaagaaatgtctgcaactatgaataatattaaaactgtaacccatgaaattgctgatgcaagcatgaatttaagtgcggcaactcaagatgttagttcatatacaatggaaatagaaaagctgacagatgaactcagcagaaatgctgaaaaaagagaattagattcagatgaaattatgaaaagagcggtaaacgtaaaagaaaaagcggaagcatcatctaataatgcaataagtctatataatgaaaaagaaattaagattaaaaaagcaattgaggatataaagatagttaaagaaatagaaaaaatggcagaagctattggacaaatagctgaacaaactaatcttctagcacttaacgcatccatagaggctgctaatgctggggatgcaggtcgaggatttgctgtagttgcagaggaagttagaaaattagctgagaagtcatcagaaacagttatagatataaagaaaaatataggtacagttggaagtgttattgaaaactttactaataatactaaagatatattgagatttattgatagtcaggttagaccagattacgaaatgttgaagtctataggaaatcaatatgaaaaagatgctgaagttgtgaacgagatgtcaaaagagattgctgagtcagcaattaaaattgcagataatgtatctaaagtcaataatgctatagtaaatatttcgtcaaaatcacagcaatcagcttctagtgtagaagagatatttgcaagtattagcgaaactagcgcatcagtagacaatgttaccaatcaggcaaaagacacatcagaaatggctgatagaatgattgaaatggcaaataaatttaaagtctagaaatataaaagttctgaataatatatagaattgttttatccaggcgctttgaaaaaatataagggattaaaatttttagaatatatgtagggccaaatattcattctagtagaatggttatttggctttgttttattctttggaaatttatattccagtaaaatctatggctcaacagttgtctgcgatttttttgtataaatattaatatagaatattttatttttagcgattatataatttattgcgatatacaacaagtaaaatttgttacataatgtaacaattgatacagtaaatgtatttttttagagttatacttataaaaaagtaagggggagtataatttggaaaaaataatagaaatagaggaaatgatttgtaaaatgagacaatccttatatgaaattataaataatgaaaaaagtttattaggaatagaagttattactgctagtcagaggttagacgatataataaatcaatacaacgagctactcgacaacgggatttaaagaaattcatatcactaatatagaagtattaaataatataattcatctttatataattaaattttatggaaggaatttacatattcctgtataattagatatgtataaggagggaattttatgaatactatagaaaaagtcataatgaatcttaagataagaccagatggcatgaatttgtatgaattggatagaatatgtttcacaacttatcaaaagactctgctcggctcaaaacttggaagagtaaaggaacgtatagagcccactctaagatatttagaggaaactaatcaaataacgattaaagagggaattgtcaaattaaaaaaaactgataaagtttagtatattcaaataaatatatttatttgaataagttgatatttatatagataatataatgataaactatacttagactatgaaatatattccaaccagaaatgagctatacgcataagtatggattatagttggtttatctataaatctttagtgtttaagattaataatagacagtggaggattagaaatgataagaatacttttgtgctgtggagggggcttttcatcaagtaccctagccagtaaggttgaaaaggagatattagagaataatatgcaaaatgattattcaattgaattttctccatttttattagtaaataagagaatgaatgaatttgatataattgtatgttgtccccatctaataatgcaagttaagaaatttgtgaaaacttcaaagattgataaacctatctatatccttccaccgagaatgtatggtctcattagttttaaggaattagcaatagatgtagtagatgcaatcaatttgtataatgaaactaaaattaatccagtatattttccaggggaagaaaacaccatgatggttactaggcatgtggcttacagaaatagcaaagtttaataaatctttgtatgtaagatttaaataacatagttaatcttttataaaattatcgtacttcaattattttataatttataatgtagtcttcagtgaggtggatttttaaaatcttatatataaaattctttaaattatagaaaatgagggcttaaaattcacatattatcacatggtaaagaagagatactttcaaatttatgaaagcatctcttctttaattaaattattgtacggaagtatcagttgttgtagttgttgatgtatttttcttttgatgagcttctttttttgcttcagatgctgccttaattttagcttgagcatctttaaatgataatcctgttatatctattcctaatttctcagctcttgcactttgaattttagctaatacatcttcatttgatagacctgtaacatctattccaagtttagaagcttctgcttgatttaattttatcctagcatctttatttgatagacctgttatatcaactccaagttttgttgctttcttagttaaattggcaagatttttagcttcaagagctgttttaattttagctgaagcatctttatttgatagtcctgttatatcaattccaagctttcctgcctctgcagataaaatcttagctttagcgttatcaggtgaaagatttgttatatctatacctaattcagttgcttttttattaagtctttcaagagtcttttcttcaaaagctgctttaattttagctgaagcatccttatctgacagacctgttatatcaatcccaagtttagcagctacagcagctcttatttttgattttgcttgatcattagttaatccagtaatatctattccaagtttagaagctttttgagtaagttttgcaagtttatcggccttattattttgcgatacttgccctgtagtaacactatttgttacattttgtgtagaagcatcatcagcgaatgctggaacaaggcttgatattgaaatcatagctgctattgcaattcctagtatttttttctttttcataattatctctccttacgtcatataaaaatttatttttatgttaaaaacatagattaatatagaaataaccggctataagggaattataattctgttatgtgaaatttatgtgaaaaggaatattaagcatataaatttattggcgccgcatttatatatttattgcaaaaatgataatactatatactagaatgaaagttctagacaaatttataattaatctaatcaatataataatataaataaagttatattggggcttaaatggaaggagaaaaataatgaacgaagtaatacaaaacatcataacaagaagaagtataagagtgtataaagaagagcaaatttccgatgaagacttaaataaaatattagaagctgctaagtttgctccaagcggaatgaatagtcaggattggcattttacagccgtacaaaatagagagaagataaataatctgatttcagcagctaaagaagcattacaaaattctcctatagagcagataaataagatggccaataatccaaactttaacccattttataatgcacctactatagtgataacatcttgtgataaaaacttaccggtaggacagtctgattgtgctgcagcaatacaaaacataatgttagcagctcattcacttaacattggatcatgttgggtacataccttagctatggttggagatgatcctaaggtcagaaatgtgcttactgagataggaattccagaaaactatgcgacatttggtacagcgacgctgggctttaatggaggaaaagaaccaaaagctccaacaagaaaagaaggaacagtaaatatagtaaaataaaaaagagtgatgagttaaaaaggcgacttctaaatatgtgaaagaaaaaaatgattagtgagactctatagttggaaaatattccggctatagagttcttttgttatataaatttccaaatgtagaatatgataatttagtttttaaaataaaagaaatgatagaaaaaagaattgaaaaaataaaactttctcttaagaatgaagaaatggttttatagttaaactatgatatagatgtattacagaaaatgcaaggcatttgtatttattttttattagcaaacactttatactatttcttgaatttcgtatcataagtggtggttagtagagattattttggaggtatatgaataaatgaatatattaataaatattgttattgtgattttacttgtacttatgaatggtttttttgtcgcagctgaatttgctgttgtaaaagtaagaaagtctagaatagaaacattagtccttgaaggaaataaaagtgctaaacacactttaaaggttgtcaataatttgaattcatatttatctggatgtcaattaggaataactttagcatctttaggtttaggatggattggagaaccggcagtgtcagatatgttaatgccattatttaatttatttaacatttcagaaggaactgcgcactcaatttcatttgttttaggtttctcaattataactactcttcatattgtacttggagagttagtacccaaatcattagccattataaccgcagagaaaatagcaatgcatacatctttacctttgattatgttttataatttaacttatccaattatgtggttgtttaaccacactacaaattttatactaaagatatttgggctttctcaagttgatgaacatgaggcagcccataccgatgaggaaataaagctattggttgaagaaagttataagcatggtttaatagataaaactgaattaacttttgtagataatatatttgatttttcggagaagacagtaaaagaaataatgataccgagaactgatatggcatgcatttttcttgaaggttcatttgatgaaataattgaatatgccttagcagaacagttaactagatatccggtatgtactgatagtaaagataatattagtgggtttatacatattaaggatttatataagcttaaaatcgaaggaaatgataataatataaaaaacatcattagagaaatcaaatttgttccagagtcaatgtcaataagtgaattattaaagatatttaagaaagaaaaaatacaaatggctatagttattgatgaatatggaggaacatttgggcttgtaacgattgaagatattttagaagaaatagttggcgaaattcaagatgagttcgatgaagagatggaagaaattaagaaaattgaagatggtaaatatatagtggacggaaaagttcatattgaagatataaatgaactggtagatgcagagattgaggttgaaaatattgatactataggtggatgggtttattcacaactaaaatcatatccacaagttaatgataaaattaattataaggaatgtgagtttgtgatattaaaatgtgatagtaaaagaataaataaaattttaattgttaaaaaagaatagctttatattaaataaataccagataagtcttttgtagagttttaaagtattttttgtgaatcctcgtaaaagatatatgattattcattagaaattctaaaattctaaagaatttaagaatataagaattttacaatattgtgataaaaagcagattgctcttaacattataaatcctattttctgaaaagactaaaggtcgtacacgtttgcttttagaatattctgcttatccagagtacaaaggaaatgtagatgtaaattctgctggaagttttattagcgctacaccttaatgaaatggaaagagcttattctatcagataataaaataatgctgattaatcaaattgattagctagaggtcgggataattaatcccgacttcaactttcaataaaataatccgctttaaaggataacattgatcacggttcaatgaaattttgttgtcgtaggttttaatgctttacatcccatatagtgcgtctaactttagataaagcttcttttgatttttctttattcataaacatcaaaattacatagagtgaatctaagatgctcaattgagatatacgagaagataaggcttccgaatgaaattcgatttcttcagatatagaaataaaaacgacatcacctatcttagctagaggagaagatgcatgactagttataacaattacttttgcaccagcttcttttactatttcagcaatcctgatagtttcttttgattttcctgtatgtgagatacaaattgcacaatcctgtggtgttaataaagatgcttccataagctgtatatgataatcagtactatgacggacatgggctggggaacgtaaaaatttatgatatgcatcttctgcaagtattcctgatccgccgacaccaaaaaaatatagtagatttgaatttgatataatctcagccgcttttttcaaatcgtctaaccctaatatcttcttagtattagttagtgttttaatgtttgaatcaaagactttttgtgccatagttaattcattatcatcaatttcaattttttcatgaattgatgtagttgaaaaattattttcttcaattaagatagccatcttaaactctttaaagccagaatagcctagtttttttgcgaattgaaataaggtagagtctgcaacattgagttcatcagataaatagctgatagaattgtgagccacagaaatgggattttcaagtatatagtctgcaatattttgttctttagcacttaatccattgtataacgatttaattttaagtctaacagatacctccatgttggtcctcctttttataaatgatatattgtaactttaaaaacactaaaaaattttgagcgtaatgtatattttaaatagtactatatataaaaatcaaatttataaaagaaaatgatatagattttttgttcatatggtcgaatgaacaagtgagtttaatatgtatgaaaagtggttgaattattaaaaaatagcattgttataagtatatcaaatagtaattttgtgtcaatatcttgaatacgacaagtcaactcagttccttatttttatgagaagactaactataataagcatttttaaagcactaacaactaaatcattagtaatcttttaactataacgacttaatatgtctgctactttatataaatatcatagtatttctgaaattgcaagaggcggatagagatagaagtatgagaaaagcgcaattgtatcaaaaaaaattttttttataaaaatatttacaaaaaaaatttttttgatacaatagagacatgaaatggagggattgtatgaaaatggcaattataggtcttggtaagatggggttaaacatagcatgtaatttaaagaatcataattatgatgttatgggatttgatttatctgataaagcaaaagaaaatgctgaaaaggcaggtataaaaacatttgataatttagagaaaatcgttacttcatttactgaaaaaagagttatctggtctatgttacctgctggagaaattacggaatctgtattgaatcaattgctgaatttactttctccaaatgacattgtcattgaaggtggaaattcaaattttaaggattcaatacgacgtgcaaagaattttaaggagaaagaaatatcttattttgattgtggaacatcaggtggaacttctggagcacttggtggtgcatgtacgatgattggtggagatcctgaagtatttaaggatatagagccaattttcaaagatatatcagttgaaaagggttacttatacactggccaatcaggaagtggtcactttttgaaaatgatccataatggaatcgaatacggaatgatgcaagcaatcggtgaaggttttcaaattgttaaagaaagtgaatttgattatgatttagctgctgttgcaagggtttggaataacggatctgttattcgaggttggcttatggaaattgctgaatcacaattcaaagctagtctgaatttagaagactacagaggagttgttgctgcatctggagaagcaaaatggactattgaaactgctttggatatggggattgcagtaccaacaattgctttaagtttatttatgcgtaatttgtctcaagaagatgatagtttttctgcaaaggtagtttcggctttacgaaacggatttggtggacattctattgtaaagaaggataagtagatatgagagaatataagatagctattgttaattcaagtagttttggaaagatattccctgaacacattgatcgtttgaaggaaataggaactgttgattattttcaagttgataatgaaatgaatggaaaagaacttgcaaacttattaagtggatacaatattatcattgcaagtgtaaccccatttttcactaaagagttttttgattataaagatgagcttttgctgattacacgtcatggaattggatacaacaatattgatatcgatgcggcaaaagaacatgatactattgttacaatagttccggctttagtagaacgggacgcagtcgcagaaaacaacattacaaatttgctggctgtattaagaaaaacaatggagtccagtaatcgagttaaagcggatcgttgggaagatcgagctgaatttgttggacatgcactttttaataaaacagtaggtgttattggagttggaaacacaggaagttgtgtagtagagattgttagaaatggctttagatgtaatgttttagcttatgacccatacaagtcagatttgtatttacagacttatggggcaagaaaagttgaattagatgaattgttgacttcttctgatattatttgtctttgtgcaaatttaaccaaagaaagttatcatatgatatctaaaaacgaaatagaaaaaatgaaagacggtgtttacatatcgaatagtgcgcgaggagcattattggatgaaaatgcggttattgagggattgaaatctggaaaaattgctggttttgcgacagatgttttagaagaagagccaggaagaaagagccatccttatctagcttttgataacgttttaataactcctcatacatcagcttatactatagaatgtctagagcaaatgggtaataaatgcgtaacagatgtggaacaaatagttcagggtattttaccagaaagggcaattcagtcaacaagtaaattcattaaaaaataggggggataaaagtgttgacagatttaaaggttaaagttggtcctgagttctataggtatcatgaaggtgcaattgattttattccgcaattattaaaagaacataaatcaaagaatatcttgatcgtacatggaacaatttcttgggaaaaagcaaagccaaagatgaagtttttagaaacgatagatcaaaatgttttttatcatcaatatacaggtgaatgtagttattatggtgcagatttaatagaacaaattgttgaagaaaatgatatcgattttattattggagttggtggcggaaaacttgtagatcttgttggatatgctggtcatatttgtaatgttaaatatggtgtcgttccaactttggttagtaattgtgcaccatggacacctttatctgttatgtataaagaaagtggagaatcagaaggaaaatctgagcattatatgaggcaggctagtttcttgataacagatccgtatttggtgattgattctccagtacgttacttcattgcagggttggcagatacaattgcaaaatggtatgaatcagattctattttatctcaaaaacatttacagaacgaaccttttttgaagctagcaagttatactgcaaagttatgtaatgaatcaattgtaaaagaatcggctaaagcgatgaaagatatggagagtaaagtagtttcggaagaatttgtacatttgtctgaaattgtgatagcagttgcaggtttatgtggaggattgggagataaatatgcccgtaatgccgcagcacatgcaatgcatgacgcaatagctaaatatattccggaaagccattcatatcttcatggcgaaaaagtagcttatggggttttataccagttggctttagaaggcaagtggtcgacgattgattctttaatgcctttctattcagatttgaaactacctgtatctctgcattatatggaattgtatccagaagatgaaaaagttcttgatgatatagttggctttattaattcaaaagaaaaagttcatttgattcctattgtaattacgccagatattttgaaaaaaacaatctttgatttagaaaaatatgtagaaaagaggtagaagaagagtaatggaaactttaagtgtattacagagttttttaatcgctttgtgggttggcgcggttatgtcaagatggtttggtggaggagcttcactaacgcttcgattttcacctttaatgactggtttgattgttggtattgttatgggaaatgttggccaagcaatgattgttacagcagcgctgcagttgatttatatgggtgttttttctccaggaggatccatgccacaagaaccatctattgcagcagctatcgcagtaccggttgctttattaggaaatttacagcctgaagccgctattgctgtcgcagttccagttggtttgttaggaagttatttatatcaattccgtttttttatcaatacattcctaggtaaatatacagataaagctgtagaagatttaaatgatggcgctattaagcgttcgataattcttttacctacaattgcatcatttgctttatttgtaccattggtatttgtagctttatattttggggcaccaattattgcagatgtaatcaatgctttgaaaggaagttatgtcattcatatacttgaagttgttggtggtggattagctgctattggtattgccacaacagtttatgtaattggacgtaaggattacttagcattctttttcttggcgtatttcatgagtgtttcattaaaatcattgaatattacaatggtaacttatgctgtgtttggtctattgattgctttaattttcagtatgtctcaaaaaggaaagaatgttcctagtacaaatgttgttaagggtacagagacattagatgaagatgattatgatgatgggttttaaggagtagataaaatgagtgaaaatgtaaaaagagctgctaaagctccagaagagatcacaaaaaaggatgttactaaagcatatttaagatggcattttgcgaatgaaattccacattcatttgaaagatatcttgcatcttctttgttgtatggaatgatgccaattttaagaaaattatacaaagatgatgaatcgttaaaagctgcttataaaagacaactattatttttcaatactcagttaagctggggtggtggagttattactggtttaatggcttccatggaatcacaacgtgcaaaagaagaatatgaacaatcagaaataacaatgcaagatgatttgatgtataacacaaaagctggtttaatgggtgcacttgctggaattggtgatgcaattgactcagggactgtgcaatatatctttattgccatcgcagttccctgggcacagcaaggtagtccattaggagcgttgttcccattcgtttgctttgcactttaccaagttttattgggtctattctttgctcgtcaagcatttgatatgggacgcaacgcaacaggattgatgggaagtacaggtgttaaaactgcaatcgatactttatctgttttaggtctatttatgatgggaatcttagcaggtaactatgtaaaagttagtgcaaatttacaatttacgatttctggaaaagcattcattatccaaaatattttagattctgttgctccgggtattttaccattagcagtagttatgggagtttatttgttctacaataaaaaaggtttaaaagttacaccagcattattatggttaacattaattttaattgttttagctagcgttagaattctatagagtaaaaaggagagttgaaaaatgggtgttataaatttagcaagagtagatgaacgtttaattcatggacaagttatggtgactctttcacaaaagagcggggtaaattcaatttttgtagtagatgaagttgtagcaaaagacccattcatgagagatttatataaaaatgcaggtagccgtactggacaaaaaacaatagtaattacgccagagaaagctaaattctattgggatgaatatcaattcaaagattataattgtatcttgatagcaaaaactgtaaaagttatgtatgacttggttaaacatggagtgccaatgaaagaattgaatattggaggtattgcacaaaaagatgcaagtaaagatttactagttacaaaatctgtttatataaacaaagaggatgtagatagattagtagaaatgaaagataaatatggagtagagaatatctatttccaagctactccttctgctcctaaaacagaattgaaagatgttgttagtaaatttaaataattgtttttaaatgagagattattattttccttataataaaaattggaggtttatcatggaggatatttttaacgatagattagctaggtattcgtttatgtatagctcacggaatagcaataaagagaaaactagatttttgaaggcgcttgtaacagatatatcacaagtgcgaaaagatatttccgtaatcgaatatagtaatcaaaaaaaagacagtgcacgaaatgtgtatgttggagatattgaaaaggcagatcaaatcgtttgtacttattatgatacacctccagcctattttggagattatgtattgttcaatagaaaaaaacaagaaaaacaaactacaaaagccgttctttgtatgtctctaatttggattttcctaggtattctaggaacacttttatatatgaaattggtttttgcaccatttgttttattttctgtgcaaacagcatgtcttgcactaatatacggcgaatattttattattttatcaaagttatcaaaaggtgagtggaatcgaaagaatttaattagaaatacatcttcagtactttgcttgctacagatgttaacagagaatcaaaatcagaaaaaagtggcttatgcatttatcgatgacggttgttatggcagacgaggattagatgtcttaatgagttctgtaaacaagaatgcaaaggtttattttttagattctattggagcagatgccactttaaatgtaatgggtagacaatttaaagaagagcttgctgaatctaaagaaatccgatatgtatcacctagaggccaaatcaattatttattttgtgcagatatgaatcaagataaagagttttacttagataagtcaaagttaaataagaaaaatttaaattatagccattttactcaagtaatagaattgttaggcatatgaaagaaaataacgagtccaacaagtcatgattatttttgattatgccttaaatcaaaatataaaaggagattaagtcatgttaggaattgtaatcgccacacatggtaccttaagcaacggtataaaagacgcagctgaagttattatggggaatacagaaaatatcataactgtaaatttaaatgcaggagatgatgttgagaaacttggtaagaagataaataacgctatcttagaagtaaatcaaggtgatggtgttgtggtattggttgatttagtgagcgcaagtccatataaccaatcagttcttgcgacaaatcagttagactcagaactaaaagataaggtttatattattggtggagttaacttacctatgttattggaaataatcaatcatcaaattttagggacacaaattgaaatagttgcaaaatcagctgcagagcaagcaaaagaatgtattagttcatggcatttttctgctaatgtagatactaatgaggttgatgaagatgatgatttttgatggagggataaaatgaagtggggatttagatggtatggagcgaaagactctattcctttaaaacatttcaggcaagttccaggaacagatggtgttgtagggaccttattaaataagttacctggagatgtttgggaaattgatgaaattaaagaatttaaggcttcaattgaaaaagagggattggagttacttggtattgaaagtgttgcggttcatgatgcaattaaagcaagaacaaaagactgtgatcattatattgataattatattcaaacaattagaaatttagcagtatgtgatattcatttagtatgttatagttttaaaccaatctttggatgggctaagacaaatttgaaatatgaaaacccagatggtagttattcattgttgtttgatcagtctgttgtagaacatatggatgcgagtgagatgtttaagcttataaatagtcaatctaatgggtttaaattacctggatgggaagaagaacgtctgaaaaagtttaatgatttgatggaaatgtatgaaaatattaaagaagaagatttatttgacaatcttgcatactttctaaaaaaaattattcctgtttgtgaggaagttgatgtgaaaatggggattcatccggatgatccaccatgggaaatttttaatcttccaagggtaacaaagaatttagaggattataaaagaataataaatattattgattctccttataatggtgtaacactttgcacaggatctttaggagcaaatccagaaacagatttagtcaaagtcatacatgaattaggaaatagaattcaatttgtacatttaagaaatgttgaatttttgggaaaacaaaaatttagagaatctgctcatttgagtatagatggatcattggatatgtatgcacttatgaaggcgcttatagatgttaattttgatggggttattcgtccagatcatggtcgttcaatttgggatgaaatagcgatgccaggatatggtttatatgatcgtgctttaggttttacttatttaaaaggattgcatgaagctatcacaaaatctcaaaaagaaaaagaattggagcaagaataatgagtgtagatgtatataaaaaattaggagaaataaagttattaccactttatactgcaactgatttaaagtatttagatgatttggaagagattcttttgcgaaatgatgtaccttttatagaagtaacatttagaagcaatctggctttagaagcaattaataaactttcacaatcgggtaagttaattgttggagcaggaactgtgcgtacattagaagaagctaagaaggcaattgaaaatggagcaagttttatagtttctccagcagtgattccagagataattgaatattgtattgaaaacaaagttccagtttttcctggaacagcaactccaactgatattcaaaaagtagttagttatggacttcatgttgtaaagtatttcccagcagatatttatggtggtttaaaagcaattaaagcattaagtggaccattctatgatgtgaaattcttgccgacaggaggaattaatgcagataactttatagattatattagtaatgataatattttagcggttggtggatcatttattatttctgaaaaaatgattaaagaggatgggaaagaaaagacgagcaacttgttaaaatcattggttgatcaaattaaagcttagtgcaatattgcacggcttttttttgatgatcatgtaattaacgacgcgactccataacctcttggttaccatctattctaatcataaaaactgttgcagtaaatgataagaagatattcaaaataagctgcattaatatagagattaggaatttagtagtaaggataagaataaataaaaaaatatgaatattgagtattgcgttttataatctataatgttatacttcatttaaggtactgcagtaccttaaatgaagtataacttggaggtgtttacgttttgtcaataatacaaacgaagaagttaacaaagagttacggatcaaaaaatagtgtttatgatattaatctgacagctaatgaaggtgaaatatatggttttctaggattaaacggtgcaggaaaaacaaccacaatgcggatgttgcttaaaatgattaatcctacatctggtgaaatttattactctggacaatcaatttcaaagttgccttctgaattttggaatcaggtgggttacctaattgaaacaccacatgcttatccaaactttactgtagaagaaaatcttatattatatgcaaagcaaagactaatacctgattcagaaattaagaaacgaattgatgacatttcacagcagctattgctagataattacctacaggttaaggtaaaagatctttccttaggaaacaatcaaaaaattggattagctaaggcgcttattcatagacccaaaattcttttgttagacgaaccaacaaatggattggatccagaggggcttgtagtcgttcgtaatcttctattagaaatggctaaagatgggacaactatttttatttcaagccatctattagatgagatggaaaagctggtaagtcgaattgggatattagcacatggatgtctgctacgagaattaaatttttcagaatttgaaacctgcagagaatctaagctttacataaaaacggatggctctgtcaagaatcttgagcattaccttgctacaaaaaacttgcaatgcacatcagtaagtgaacaggaaatacttgtttcggatatatctattaaccaatattctgctttattacagcagttagaaaatcagaaatttaatccaatgatttttcaacctgtaaatgaaagcttagaagaattctttattagaacaattaaggagggcaaatcattatgaaacagatatggtcaatgactaaaattgagttttataaaataatacgaggtcatataccaatttacattttagccttttatagctttttgttacttatccatatgcaggataaaacgtgggaagaatttttgaaaaatactttttttatgtattctactgttattggattaatgggatttggtattttaagcagctgggtatttggtagagagtatcaggatcaaacttttaaagatcttttatcattgccaatttctcgtacaagtttagtatgtgcaaagttttttgctttaggattaagttttttaggcataacagtattagcaattggtgggacatttgccatgggtttgtgcttggattttacaaattttgatgtgttattgactggaactcttctaaaaaggttagggatagtaacactctataattgtagtcttagttttctattcccacttatcgctagcatcacgcgaggaatattagctcccgttagtacttcctttgtagctataattatagctgccatttttggatcgcagcccatgggtcgttatatcccgtggacaatttcaggaatatatttaaataatcctcagcttattaattggatcagtaaattcacgattttggctattttatttattggtgtttatggtactatattatggtggaattatgtagaccaaaaataggaggttatatcatgaatgaaaaagttagtcgacgccgaggagttatacttgaaaatgcgattttagatcaggcttggttattgcttaatcaaataggatatagcaaattgactatggacgatgtagctcaagctgcaaagaccaataaaaatgctatttatcgtcgatggccacaaaaatgttatcttatttttgccgctttaagccgacatgcaccatcaatagaattagaagtcagtgatcatggttcgctaagagaagatttaatagccttatttaatgttttaaatctatttgaaattatcagacccgatgatctacgagatgttattttagatatgctttctaatatgacgccttacgatttatttaatgttataaacaacggaaatggtcttcgtgaatcaactgaaactattataacgcgagctaatcagcgcaaagagatttcactttcaatagatactatttctgaaaaggctttaaatttaccagctatactaattataaatgagcttgttttacatggaaggatcacagaaacgaatactgaggatattattgataatattttgcttccaatatataaagcgagtaaataatctaatcggtaagaataatattggacttataattaagattccattattatttcttaataaagaaaagagctggattcatagcataaagacaattagattagatttaaaaggttcaaatgttgattaaaaaatagaacttggaccttttattaattagctcaatatcttatttaggaaataatttatgtaggctaaaaaatgagctatcgctaatggattttaatccgctaatgcgacaacccttataatgcctattttaatttcctaataggatttacttactaaaccatgctttactaagtaaattaacgccttcagcaatctcactctcagtcattccaccaaaaccaagaaaaaccatattattagaatatttatccttgcgtaaccaatatgtagatacaggagagactataacaccatattctttagctttttttattatctcttcttcagataatccattatttaattccagcaagatatgcaaacctgcatttttaccatgaataataacattatctcccataaatttatgaatagagtgaattaacatatcatgtcttcttttatttagaagagatatcttgcgcagatgactatcccaatgtcctaaatgcataaactgttgaatgattttttgctcaactattggaactgaggtttggtagctactaaaagatttatcatatatttctagtaatgattggggtaataccatataattcaatcgcaagctcggagataaagactttgaaaaagtaccaatatatataacatagccttctgaatcaataccttgtattgaaggaattggccttgaattgtaacgaagttcactatcataatcatcttcaattataattccattttctcttcttgcccaatctaataattgtaaccttttttgaattggcatcactgatccagtaggaaattgatgtgagggggttacatatactatctttgcggaattattttctaattcagcaatatttattccatccttgtctaagctaattggaacaacatcatatccgttattgttaaaaatctttcttgcgccaatgtagccaggatcttctaaagctattttagaaaaattgtttctaaacatttggcatagcaaacttaaacactgctcaaagcctgaagtaataataatctgttctgaggtacatgagacagcccttgacttatttaaataattcattatttctattcgtaattctttttcgcctttactgctagtataggatgtcataacatcagcatctatagaggccaagcatttattggatatccttctccacaagcgcaaaggaaaatcagaagcatttaactttccatatttgaaattatacttataattattatcataattcatcttaggtatcgtagtttttatatatttctcaatattgacagagttatctctttttaacttagtgattagcatactatctagtttttcaactatgaatccactgcctgctctacttgtaacatatccttcagaagaaagttgtagataagcactttctactgtatttctactgacatttaatgttgttgcaagcgttcgtgttgaatatagcttactaccttcaagaatttgtcctgaaattatctcttcttttagctgctcgtaaatttgcaaatacagtggaactcttgaatcattatctagaacaatcatttttttaaaacactctccttataaactgtatcctataaaataaaatgaattggcacttttgatgagtacacgttgattgtataattgttttatagaaaagtcaatgtgcacaaattaagactttttaaaatatgaaaataattaaatttgtagaaatacagaggaggaatttaaatgttaaatgaaaaattgcttgaagttatatcacatgaaggtgtagtggctatagtatcttgtagtaacaatgaggcgcatgtagttaatacttggcattcatttcttagtgttactgaagatggtaggatattagtacctgcaggaggcatgagaagaactcaaaaaaacatagaagcaaataataaagttaaagttactttaggtagcaaagaggttatgggacatcaacatccaggagcaggatttttaatagaaggaactgcaaaattccttgtagagggtccagactttgatatggtgaagaaaaaatttccttttttaagtagagtattagagataacagttatatctgctaagcaaactatatagcaataatataacatagcttttgaaaaagagtactttatattagtgaaatatctaaaaagtactctttttagatgttattaatatggattatgtaagtttaattcagcaatatatagggtataggactatataatatgagaagttggatagcaattgattatgttcgtatataaataatcttatctatcaattagagggcagtttattaaagataggataaatgtaattattgtaggaaaacagttaggatattaatattgactcatacctaagggtaggaattaaaataggtgtataaagaaaaataactattcatataatttgagcaatatgcagatttatagtagtaatttataaaaatatagaaaaaacaaaaggaggaacataaattgaaagttgatttttatacatctaaaagagaatatgaagaacataaacaagaatttgataatgctgttattagcgttatgcaagaaggaatttcaacgcttggaaaagaggtgactgattttgaaaaatctattgaggagtttaccggagctaaacatgcaattgctgttgcatctggaactgatgcgctaattttaacttcggatattttaggatttgaaaatggaaaagaagtcatcacatctccatttacttttcttgcatctacatcatgtataacaagaagagggggaaaaccagtttttgtagatattgatgaggacacttttaatattgatgtaaataaaatagaagaaaaagttactaaaaatactgttggtatagttccgattcatcttttttcacaaatggctgatatggataaaataatggacatagcaggtaaacataatttgagagtacttgaagatgctgctgagggatttggaatgagatggaaaggaaatggatctgaatataaacattcaggcactattggagattttgggattttctcattctttccaaccaagactcttggtggttttggggatggaggaatgatagtgacaaataacgatgaattagctagattagctagaatgtatagagttcacggagcatcaaaaaaatatcactatgaacacattggatacaattcaagattggatactatacaggcagctattcttcaagtgaaaatgaaatacataaaagaaagcattaaaaagagagaaattgttgccaattggtattttgataggttaaaagattgtcaggaattaaaatttgccactttgaagggcgagcaaaatcccgtgtattatgtatttaatatattaacagaaaagagagatgaacttggagaatacttaaagaaaaatcagattcaatttagtatttattatcctataccattacatcttcaaaggtgtttcagttatttaggttataaaaaaggagattttccggttgctgaaagtatatgtgagagaatacttgcacttccaatatatcctcaaataacagaagcagaagttgattttgtatgtgaaactatcaaaagtttttttaaataatattagaagactataaaggtgaattagagagttgaaaatactagaaactttacataatatatagatttgatgtagtaaattatggtgaaatactactagcgcatagttatatcgaaataaaatcataaagtataaagaggagagagaatatggaaaatataaaaattaaaaaagctgatttagaagatttagagttgattggaaacttattcaataagtatagaatattttatggacaagattcaaatttagaatcttcaaagaaatttattgaagaacgaatgatacataatgaatcagtaatttttattatcatgaaagactcaataatacctctaggatttgttcaattatacccatctttttcatcagtatccatgaaaagaatatggatactaaatgatttatatgttgaagaaagtgcgagaaagaaaggtataggtaaaagtttaatgaataaagcaaaagagtttgcatttgaaacaggagcaaaaggattaaccttatcaactgcaatagataatactactgcacaaaaactatatgaacaatcagggtataaaagaaatgaaatgttctatcattatagttattttttttaataaacaaactaaaatgtattcaagtttaatttctgttttacggtcatgctttaatgttatattcaatatataagatttacactattcttaaattatgaattactaaaaataaatagcaaattataaaatcgcattattcaagagattgaatttgcggttttttactgcacaatatgtagaaagtacgtggcaaattaaaatgatgttctttgaaaattgaataatgagatatttacaatttatgttataattaattcatgatagtaaattatggtgaactaaacagaggagggagaaagttaatgttttttcaaaagattattaatcgggttagcgtattaatctcatggttttatgggtttacaatattacgtatatatgactttatatatattcctaatatttcttttccaggtgatccttttttccaacacccaagtaataaaggagttataagaggtgttttatcagttttagtttattttagtttgataattatcttgaattatatagtaaaattaaaagttaaagaagattctaaaaagtttatttataaaaatgttatagcatttttcgttggtttatttctattttttatcattgggtcattatttataccttataatgaaacttctgggccttgatgtgatgtatttgagacacttgaaaaaacatatataacattatagatattctgctttaaattaatatacaatcttcttatttgacgtaacaactaataaaaatgttctttgaaaattaaataatacgatttttataaaatatcctataattaatgaataatagtttacaactgcgaacggaagattatttatattgtagagggggaaaccaataagaaaacttaggcacaatcacattatattgttaatatatagaacaattattctttatactgccacacattcataacaaggtaaaagaatgtttatatatgattataatgcaatattaaaatagaataagtgataagaaaggtgaaatgatgagaagaaaattatttggttttggaggatttatattaataaacataatgttatatgtttatattataaaagtgtttttgccagttttaaatagtattggtggctatgaaagtgaagcggtaggtccaacaaattggcaggtactgcaagcattaggcataattgcacctgctattttgatttactttgttgccgtttatttgttttattactttaaaattacaggacttaataaatttgtttttcctatccttagttttacattttatttattatttatttttttaggtattgccgtatgcggtggagcatttgggtggatagtattattaacattcataccagctattatagtgttgctgttgtcgttttttttggggtggaaatatgataaaaaatataaaaatcaacaaaaacttaacttctgatattatcacaaacaagatgtcataatgagaagctcatcaaattacaactattgagttagtttacttcgctttattctaaaattatgaatcattaaaaataaatatcagattgtaaaatcgcattattcaaaaagtgaatttgcgattttttttactgcgtcattctaaaaaaatgcgaagtagctattttaaatattattctttgaaaatttaacaatgaaatgtttacaaaatatgttataattgattcgtaatagtaaattattgtcaatgatcaattaatactagggaggaatttcgtggataaaaagataaatgcaaaattgacgaatataaaaaattcaatggctaacttcgcagattcggtaaatttttacgtaaatttatatattatacatttattttatattattcataatttgattttgacgtatcaagtttaagttgctcttcaccccataggtataattccttaaatgtgggaagtaaggctttacctctttctgtcaaagaatattcaaccttagggggaatggtttcatattgagttctaacaattagcttatgttcttctaattcttttaaagactttgtaagcatcatattagtaatacctttaacttttcgttttaattcactatatctagtaaaatccttgttggataaacaccataagataggtaatttccatttttgacctaaaatatcgagtgcatatataacaggacattttctttcatatacattatcagcagggaattctttattataattcatataatcactcataatcacaactccttcaaattcaatagtatactttttatactggcacagaaagaactgcattcttgtatatcttttctcctatgctatattaattataacaaaaacattataagagaatatacagaaagaggagtgttactatgaaaatttatggtattaacggaagtccaagaaaaaataaaaatacagctacattgcttcaaaaagctttagatggagtaaaagaagctgcaaaagataaagaaattgaaactgaaataattaatttatatgatttaaattatactgggtgcataagttgctttgcttgtaaaagacttggaggtaaaagttatggaaaatgtgcagtaaaagacgagcttcaagaagttttagaaaaagtatctcaagctgatgggcttatttttagttctccagtatattttagtaatgtaacaggtaaatttctatcatttttagaaagattattatttccatatcttgtgtatgataataatggtacttcactggagccaaagaggatgccaacagcatttatttatacaatgaatgttaaagaagaggtgatgaagcaaattggttatttaaaaacttttgagcgcatggaatctaatattggacatatattcacaaaaccattagttatgtattcaaataatacttatcaatttgatgattactcaaaatataaagttgaatccttctctgaagaagaaaaagcagcacatagaaaaattcaatttcctttagattgtcaaaaagcatttgaactaggtgcaaatttaataaagcactagaaataaagtagtatattaaattatgagaaaagttaacttataagaaaacttttgattagttaaatagatataagtttattaattttattttggaaaactatgaaatatggcatacaccatactagcattagaagaaatatgtaattaaaagcaacttgaaatttaaatatagcttaaagcaagaaatgaaagtgctgtattattctagagtgaattatacagcattattaattatatatgaaaattaatttccttgcctaatgaaaaataatcatggcatttaggtcttgttatttttttatgtgccttattttttgttttatatgatattatttaataattcattttttcccttttctactgatcattatagatgttattacacttattacaagaattagtaaaataactgaaatagaaatcactatagatatatgatacttaaatgatattccaagctttataccagtaaatataagtattaaggctactccgtatttaacatattcgaaggtgctgtgtagtttttctaaaataaaatataaatttctaagacctaatattgcaaaaatatttgatgtgtatacaatgaaagcattagtcgttattgcaaatattgcaggtattgaatcaatagcaaatagtaaatctgatccttcaattaaaaataatattgcaaataacggtgttgcatgaagaacattgtttattcttataaaaaacttttcatcatgaagctctttagttacaggtatcattttttttagaagtttaattaatttactgttctcaaatgatacatcatcttctttgttaatcatcatttttataccacttataataagaagtataccaaatatatatataatccatttaaatgcattaataattgcaattcctaataaaacaaatataaatcttagaataatcgcaccaaaaattccataagttaaaattcttttttgatgtttagcagtaattccaaagcttgagaaaattaataaaaagagaaaaagattatcgacactaagacttaattcaataatatatcctccgagaaattctaaagctctttcagaacccatgtaataccatatagctaaattaaatatagcagctataaatgtaattaataaaaacttaaataaatgttttctagtagacatttttgtagctcctttcagataaatttgtatttaaattgtatatatttttttaatatattcgaaattttatgtaaaaacaatattaatataagttttgtttttttgcgtaaattataataattttaaaaagtaattaaaaaactcatttaaaataatataacaattatgtaagaataaatcaataaaagtttatcatgttaagatttttataatattgacaagttttttatttaatagtaatattgttaataacaatattaaaaagacagtgataatctcatttatagggggagtaactgcctgttaattataacaggattcaaagtcgtcattacggagagatcccggctttgaaagcaaaaaatgcttagtgagactctatagttagaacgtgttctagctatagagtttttttgttacataaatttctgaattgagaaaaaattgtcaaaatattttagtgattaagtaaaaggaggaaaacaaaatgagtagttttggaaatcaaattaaaactttactcttgatgagtgtcctgacgatattagtagtattaataggcagaggtattggagggcaatcagggatgctgatggctttggtgcttgcattagttatgaatggaggaagttattggtttagtgataaaattgcactatctataactggagctaagccattaacaagaaatgataatattgaaatttataatatggtggaaagattgacagcaaatgcaggaataccaatgccaaggctttatattacagcttctacgcagcctaatgcgtttgcaacaggaagaaatcctaagcattcagctgttgctgttacacaaggattattgaatatactaaattatgaagaattagaaggtgttattgctcatgaactggcacatattaagaatagggacgtgcttataagtactattgcagctgtaatggcaggagtaatcacaacaatggctaattgggcgcaatgggcgttaatgtttggcatgggtaacagtgatgaagaagaaggctcaggattcctagcagctttaccattaattattttaggacctattgcagctatgttagtacagatggcagtatcgagatctagagaatatcttgctgacagtacaggagcgaggattgcaggacatagcagaggactctctaatgcattacttaagttagatcaggcttcaagagtggttcctatggacgtaaatcctgcagtaagccatatgtttatagtcaatcctctaagtgcgcaaagattaatgaatctatttagcactcatccaacgatagaagatagagtacgtagacttcaaaattcaaatttatagtcttatttaaaattaggaaactaacttgctatttttttgaatgagccttaataaaatatgaaaagatcgtactatacaaaggaataaagtttattcaagtgaaatagcaggaagtctaaaaatcatacccagataaattcgttaaatttcaaattgtagaattccatgaagatgagaagttcaaatatcttgatgaagttggcataacaacagccataaaatatagaagagaaattattatagaatttacaaaatataaaaatggtcagttagttgcagcaatgaaaatgaagtatgagaatagaaaagatccaatatttttgtatttgaggaggggggaattaaaagcaacttgaaatttaaatatagcttaaagcaagaaattaaagtgctgtattattctagagtgaattatacagcattattaattatatatgaaaattaataattaaaaggttgtatatcagtgatatagctattggtgcaattaattagaagtgttgtaatttaatttgggtatttaattttaatttatttttatcaaataacgtccccattatagacaataaattaaaagattctatcttgattattaagttgtgagcaacgattaaattccatttctaataccgtgtttactgtatgtttacctagattatctaaagaattatatttttttaataaacattctaattcttctgatagttgtaaacgtgtttttattttgttttcatcccatcccattaaaatagatggagttgtttctaatattactgcaagtttttcgattttgtcagaaggtatattagagattacaccgctttcatatctttgaagtgttggcttactaatagataatcttttagaaacatcttctaatgtgagattcaattctaatcgtctatttttgatattttctttcaaacccattttatatcacctcttagttctatattaaaagtaagtaaattatagattatcaattaatataatttattgataatctataataaaatcgaagcgtcctaataaaacttaataactttttatttagtttgtttactgcagttaggcaaattaaaaaaatcattctaatttggagactattaatataatttattataacatctgtttccggatatgcaacaattattttccattatatagaaaaagttacgtaggaagtattgacaataatagccataatatataaaatattacttaacgagtaacgaaaggagagcatttatgatattagttaatgagttaaaaggaaagataaaagcaaaaggatatactcaggaaaagctggcaagggaattaggaatgtctccaaaaaccttaggtaataaacttaataaaggaatatttggttctaatgaaatcgataagatgataaaactgttagatataagtaatccaatagagattttttttaataaataaattacttgaaaagtaaattgtattaactttatatatagtgttagaaatcaaaaattaattatatatattgcaaaaataattcttcatcacaattctaaaaatattgcaagaattttatacgtaattgtgaaatgtgcattgggaattgcaacgtatatattgtaatgtaagagcattatgttgagctgataattatttttatagaaggacaagctatggaagaatcattaaaagaaattttaattgaattaagaaaatagtagtcttaaattaaaaaataaatgcaaatttattttaatacatctttagctagaatgtatcagggatacaacttttgatagaaatgtataaaaagaaagtgaggacttacaaatgaattttaggatttttaaatgttatatagatgtttgtaagttaattgagttaaacccatcatggaatggtctcaaaagatttaggcaattttatttatgggagcgtgaaaataatggcagatattaaatggattaaattagctactaatatgcatgatgatgaaaagatgaagttaatagatgcaatgcctaacagggatacaattcattatgtttggataagaatacttttacttggtggaaaacttaatgctaatggaaaggttttcttatcagaagggaaacctctcactgccaaaatgttagctgtattattttctaggcctttagaggatattaagattacattaaaagtattatctaactttggcatgattgaaatagcttctgataaagtaattagaattgtgaactgggataagcatcagaacatagagggaatggaaagggttcgtgaacaaaacagaaaaagagttgaaaatcatagagaaaagaagaaagaagagaagaatgcagctaaaagtaataaggaagaaactcaggaagataaagtcttagaagaatttatagatttagaagaaaatcaagatctggatgaaagtgtagaattagaaaaaactaatgaattagaacgaaagaaagattactctaagaattctactatagaagaaaacaaagctctaggtaaaattgatatattagaaaatttggaaactaatgaagatatcagtaataacattttagaaactgctgatgataattgtattgtcactaaaaataatagtaacgttacacgaaatagaagtaacgttacagtaacgcagcagaataagaaaaagatagataataagaagaagaataagaaagagaaaaaagagatagataaagataaaaacatagagggtaaaaagaataatggttttgatataaataataaaggctcagcttgtgatgatgaagttagccagtcgaatctatctaagaaacacaataatactaaaagtgaatccggggaagaggaggacataaatcttaaagctttagagcttatgcattatcatgaaaaaataacagggaagccaggaggatgcgactatgttgctcttagatcggctattgatatccatggagaaaaaatggttaagatggccatggatgttgggtttgagaagaattgtcctgacataaagtatgcaattggggtattaaaaaactggaggagagatgggtatccagaagatcatatggaggtaaagaaaaatggggttagaagcaatggaaagagtgacagagcagataaaaatgaatttgctggattcaagccaaaggaaccgcgaaaacttacagaagctgagcgaaagaggattgaagaaaacctcatataaatgcgataaatgctgcgatactggatggatacttatcccccaggaacatatgcagcctcttgctgtagcctgtgaatgcagaaaaatagaaaaactaaagaatgagtggaagtattcgggaatcaatgttgaacaaagtaaacttactttttctagttttgaagtttggaataatgcgtcacaaaggatgaaggacactgcagcagcatattgtactgattttgatgaaataaaagataataggcgaaatagtattctattatgtggacaggttggcagcggtaaaacgcactgcagtattgctgttgcattaaattttttaaaacaaagaatcaaagtggtgtacatgccttatcgtgatgtaatcacaaaggtaaaacaaaatatgattgatgaagaatattatactaggaccatttcaaagtatcaattatgtgaggttctacttattgatgatctctttaagggaaaaatcaatgaaacagatacaaatattatgtttgaaattattaattacaggtatcttaattttctgcctatcatagtcagcagcgaattctctattgacagattactgacatttgatgaaggggtcgcttcaagaatatatgaaatgtcaaaagattatgttgtagaaattgagaaggatattagtaataattataggcttaagtaagagcccaaaaagtgagagtccaaattttatatttggttactcgaactttctctgtgagatttcatatttggctgctcgcacttactcctatgaacgaatgtgagtaggagtttcatagattgtgcctaagctaggttatgaaaatgtgattttagaaaagaaaatagagatattagaggaaaagacaagagtaattcaatgcaagaaataatttatatgaggagaatgtaaagatgaaatcgtcaggaatagtaagaaagctcgacccacttggaaggattgtaataccaaaagaaataagaaaggtactagaaatttacgagggagattccatggaaataattaaggttgataatggggtggttgttaaaaaatatattaaaggatgcattttttgtggaagtgataaagatgttgttgaatttaatggagcagttgtttgcgatggatgcagaaaggctttagggcaggattaaaccagttgaacttatctaggagcgtgcagtcgttatcttctacttaaagaatgggaggtacggatgctagctatcggataaaaatctaagagatgcacttttaagacattgcagtggtgtcgtgaaacacgacataggggtagtaacaggaaaaaggaaagattgaacgtgtgctatccaaaatgtagaaatgagttcaataccggaattagatgtatactgcctaactgcaaaatccgaattgccaggtgaataaaatacttattgacaaaataatctattatatttattattatagataaataaactctgcaatatcttttaggaggttttaatttgaaatatacaaaagcaacaaattatgctctacatacaattgtatatatgatggaaaatgcgaaaagtgaaaagctaagcgtaagtgctctagcggaacactttaatttatctactacatatctttcgaaaattttaactcagctggtaaaagctgatttaattgagtcaactccaggtgcaaatggaggttacgttttgcgtaaagacatgaggtctatttcttttatggatgttattaaggccactgaaggaactggctcattatttgtttgcaatttaaatgaaaatagcaaatgcttgattgaaaaagtaatgtcagaagctgaaaatgtactagaaaattatctagaagataaaaaactatatgatctgactcaaaataaatcaaactgcaaaaccaacaaagaataaatatttacccattaatatatgggtttttatatttgaattgcagatattatatatctttaatatatctaaaggagaaattacataatggacaaaatacaagaacttgaacaaaaacctattggaaaattacttatacaatattcagttccaacagtactcagtttattgattaattcactttatatagtaatcgatcggatgtttataggaaatatatcagaagtcggaactctagccttaactggaattggccttacaatgccaattactacaatagtagtagctttatctgctctcatatcaatgggggccagctctaatatctctataaaactcggagaaggcaataaagaagaagctgaaaattttgcaggaaatgcactatctctaagcattgttttagggcttttggtcactagtctctatatgatatttcaaaattcaatattaggatggctcggtataaacggtgaagtattatcttatactaaagattttattacaatcatcatggctggtaccgtatttaatatgctgggattttgtctgccttttatcgttcgttctgatggaaatcctatattttcagctgctattacaattacagggtgcattcttaatatattacttgatgccttatttatatatgtatttcacatgggaataaaaggtgcagctattgctactgtcattgctcaatttactaccgtgattcttggactttattatttcatgaaattaaaaaatactttgatacttaaaaagatcaatttcaaattacatatttcaattgtaaaagctattttcttaattgggttagttccattttctaatcaattatccgtaagtgttgcacaaattgtaagcaattattccttaaatttatatggtggagaactagcaattggcgcaatgactgtactaaactccattacaatattatttttgatgccagtttatggaatagctcaaggcttccaacccattatcggttataattatgcaaaaaagaactatggcagaaccctgaagactcttgcccttgctgttttgtttagtactggattcttggcagttagtgctataattatgcagctatttcccaaattcgccgttagtctttttacccagaaccctgaacttgttaatatttctataaatggcttaaaaaaatatacagtgcttatctttcttatttccattcctacctttggctctggcttcatgatgctaacaggtaaacctaaaaccgccgtactattaagtatatcaaggcaatcagtgatattagcactaactatatttttcttaccaaaggtaattggtcaagacggactatggttcgctcaacctataacagaccttttatctagcattatcacaattatattattcataaaaggatatagtgatattttatacaaaaaaaacatcaacaaaggtataagaaagacaatatccaggatactttagttaagtaaatttttatcaatttacttaagctttcatataaaaattagaagtaaagaaaaaatggagatttatccttgcaatcaggataaacctccatttttatattcaaaattaagctacatcaaatttagtaacttgtctttgagtaacttgagcaccagatttcttaactaaatcaccagaatcagtcttgaaaacatttttagaaattacagtgtccataagtgcattaacctcatcttttgtaagagtaggtttaacaccagaaacacttaaagtacttttttcaccagctacagttaaaaaagtcatagataaagaatattccatttaatttacctccaatcttaagtagagaactcgaatctatgattcggtgtgaatcagttaagcagacctctcaaaagtgatgctccaaatcttgtatttagctataagtgataagttcttaattgcagcatagctgcttaatttataggtgcagaactttctctgtgagcatctatgatttgatggtagccgcttactctgtgagcactcagcgaacgaatgtgagtcgagtttcctacaatatttttttagaataagatcctaagcatttgctaagctagaagattcattaataaagtaatctctagtattagcttccataacacctttgattgcatctgcaactgcataaacattttcaggtgtagcatctgtttttatacctgagaaagttttcttggtataaattggatcgcctgccttgtctagagctttttgaacttcgatactgagagaaacagagtcaatagttttagttacagccatagttttaacctcctttattttgttttcataaaggatatatgtataaattttagtcattacataaatagatgaaaattatttgttttcttatttaagaaaagaactaaaacaggttaaaggtattaaaaggatgaatatgaaaagtgaatgttttagtttataatttttcaagaaaaatcaaccttgcataggtagagtaataaataaattctatttttgttattatttttgaaggctatagcttgaaattatggttaatatatttctgtaaagaaatatagtcaaaaggaggaataataatatggcatcaagtagtagtggaagaaatacaactttagtaccagaagcaaaacaaggattacaaagattaaaaactgaagcagcttcagaaattggattaagtgattatgaaaacattgataaagggaacctttcttcaagagacaatggtagaattggtggagaaatggtgaaaagaatgatagaaagctatgaacaagagctttaaataatagtgaatgcaccaaatctgtttttggtgcatttatatcctatggctagatctaggtatattttatagactttgtttgttaaagaatttaaatagatttactaaataaatattaacttcattatacattttaattttatcctttctgaatagaacttaatataacacctatgatgacaataattcctcctaatatttgtacggtagatacactttcatgtaagattaatattgaaaatatcaaacctaaaacaggaactagattcataagagatactgaaatactagcagagagttttctgagtcctaaattatataatagaaatgcaacaatagagcaacctacacttagatagatcaatgcgcttgctgaagtcatggtaggcattctccatgttttaccctcgatgatgacaaatggcaaaaagaagatgaagcctgctagcatttgataatatgttaacgtcattgcagaatatttatttgtcaaatctcttgtaataaagttgtagaatgcccatacaactccagctcctattagaattatatttcctaacatagatttagaatttccatctacattaatttgagttaaaactgcaacaccaatgatagcgagtataattccaagtatcttttttacatttggttttgaatgataaataaaaaattctagtagtgttgtaacagcaggaaaagaagctactatcaaagcagaatttgaagaagatgtcatactaaccccaatgttttctattgcaaaataaagtgtaatccccaaaaatccacttaatgcaatacgcatacgatcttccttttgtatttgttcattatttgatgtgattttcctcatgaatcaaaagagaatcacagcaaaaagagttctaactgcagcgagttgaataggagcaaaagtttcataagctaattttgttgcaataaaagatgcactccataatacaacagtcccagtactagccaagtaatagtaagataaagttccattttgtatagttgttttttgattatctagtaatgatttggcctttaacatagaaatatatatcccccttttaatttagtgactactattgtaactacttgtgattacaatatcagttttagttgattgtgtcaatagatttagttataatattagttactaaagtagcgactaatattattggaggatttatggaagataacattttagaagtattaaaaaatttaaattttacagaatatgaagcaaaagcataccttacattgttagaagaatcaccattaacaggctatgcagtagcaaaaaattcaggtgtgccacgttcaaaaatatatgaggttttagatagtcttgctatgcgtggagatattttaattagccatggaaatacacaacagtatgttccaattccagcaaaagaacttattaaaaatcgtcgaataaaagctgaagaaaattttaaacttgcagaaacatcgttagaacaatataatcaatcttcaaagaatcgtgagaatatctggaatataactggtcatgatgaaatacttgataaagtaaaagaatgcatcctctcagcaaagcatagaattttgcttgaactttggaaagaggaattcaaagaattggaagctgaattaaaaaaggtagctgataaaggagtagtagtaacaattattgcttatggagaaataatagctgattttgcaaatgtttacccacatgatatgagtacagaaattaccgatgaatacggaggacgttggattgtagctagcgctgataattcagaagttgtagcgggtattgtatcactaggtaaagatagcagggcagcatggacaatgcatcaaggattggttatgcctataacagaagtaatgattcatgatctgtatattatggaaatcatggagaagcatagagaattattagaagaaagttttggcaaaaatcttattgaacttcgtaagaaattttctatataccaggatttaaaaaaacattatgtataattaatctatgaaatcataatagtttatttataaaaaggataaccacaaagaacgtggttatccttctaagaggtttccctcactgtcgagaaacagtagctcatagtacttttggggccttcctttgccgctgtctcttttttcaaatacagttctcgcatattccttttcttcgattttgttaagaatacggtttgctcctctgacggtgatggataggcattgggcgacatcctcagaggatagtttgtttgttctcataatttctgcataatacatgattttctgcagattaatgttatttattccgatgcttttggccaatgccatgattgctggatcggccttttcacaaaactgtataacattcatgttctgcattggtccgatgaccttctgatcctcatttataaaaaagctgcagctgcctgtaaatgcattggcctgtcggtgagctctgatggcgttttcgttagcttgataatattcatgccccgagccccatccgattattactttgtcgcttgcatgctcctccaaatatttcaacagtgcacaattctgcgcgttagaggtgattttcgtaaaatttccgtaggtagtgtatagtttaacaaagccttccgaaacttgggccgtgtctggaagattcatgctgctcagaaatctgccggctagcactttcagctcatgaagttgctcttcggactgtgggtgcaccgtttcaatcgataagcatgccacaactgcactcctgctcttgagctcgaggatggtaatttcgttgatgatcccacttatggtttctttaacgttttccaaagtgggtcgtattaagatatattttaccccgtgtttttttagttctggaacaaaatggctgaatgccgtaatcgacaagtctattttattttcttcccacagtgttatatggttttcaagcattgtttccactctttcgaacagattgtcgctatcaataggctttccctgatgagtcaagtacttttggaattcactgaaagaatcgataatatatgcaaaatctaaatagattcttgatatgtcaagcccaggttcagtaagcagcagcctaaatagctctctgtatagaagggtttcattatcctgcaaaatgtgcgtaggtactttcgtatctaaacattccttatctattgattcgtaaagaatcctgccgctgataacaaatccgtccaccgaatctaagttttttagatatacgtcttttgtttctctcaagttactgattgtaaaaattcgaaacttacataccgactgcaattcttcttcaatgtcgcggaaatagtccatataggattccgttgtgattatacccagtctgattttcatggcaaattcctttcataaacaatttaatgacatgaattataacataaaaaatgtcatatttcaatgatgccagtagttgggaaaaaatatgttcttaaaatgtcttattttattattgacaactttttgttcttaaagtacaataaaagtgttcttaaaatgtcttaaaataaaaaaatgagcaattttaatctgttgttcactaatacaatctatttttaaggaggtgttaattttggctgaaaaaactgaagaatttttgaatatggccaatcagttacaggaaaaattggtcatgtacagacatcatcttcattcgattccggaacttgacctaagtttacctgggacaactgcttatgtaaaagaggcgttggagtcgattggacttaagcccactccagtgggagaatcaggattaatggtaaccatcggcggacaacgccccgggaaggtgattcttattcgtgcagatatggatgcgctgccaattgaagaagaaactgatcttccttttgcatcatccaacggaaacatgcatgcatgcggtcacgacatgcatacttcaatgctgctaggagctgcagagatactaaaggcaaatgaagggcagcttttaggaacggtcaaacttatgtttcagccgggcgaagaaactatgcatggtgccaaaatgatgattgaaaaagggatcctcgaaagtcctaaagtggatgcggcaatgatgctacatgtaatgacaggaattccgtttcccaatgggttatttattacgcctgaggctggaggagcgagttcagcttcttcagattggttcgaagtcatcatcagaggaaagggtgcacatggagcgatgcctaatgccgcagtagatccattaaatgtaattgctcatcttcatctggcgctacagggtatcataagccatgaaatttctccaactgatagtgcaattcttacggttggagtaatggaaggcggaactacaaacaacgtgattcccgatactgccaggatgaaaggcagcgtacgtacttttgacgccgtattgagagaaaaaattgaaacccgtatccgggaaatttccacaggtattgcggaaacatttaatgcaaaggcagaggtgatttataccaggggatgtcctgaaataaaaaatgacagcgagcttagccgtcaaatgagaaccactatagcaaacacttttggtgcaaattcctatatttatctatcacaactaacacccggtggtaaattaatgggatctgaagacttctcgtttgtaacacaagaggtgccaagtatctcggtgtttattaatgcaggcaatgctaaagaaggttatagttaccctatgcaccatccaaaggcgatattctcggatgatgtgcttaagaaaggtgctgctgtttatgcggctttcgccagagattggcttgaaaataattaataatattaaaacaaaattaggaggaattaaaatgtcagaaaaccgtatgattggaccaacaaaatttgaagagtactcagagaagtacaaagagtttttatcaatgacccgtcgtgatggaataattgaagtaagattgcatactaacggaggaccatatgaacataattgggaagcccatactgcatggtctcatgcatggtcagatattggccgtgaccctgaaaacgaggtaatgattatttctggaacaggggataaatgggtagtaggaaacccagatgtctggaacacaaaatttatggattggcctaagcaaaagaaacttgaacaatatcatgaatcactaagactacttgaaaatatgatattctgcattgacatccctacaattggggcgataaatggtcctggaactcactgcgaaattgcatctctttgcgatattacaatttgtacagaagacgcggacttttttgatccacattttataggaggcacacctcctggagatggaatgattcttacattgcaaaatatgattggttttaagaaagcagcatattacgcatacactggtaagaatattaatggtcaaacagcattagagcttggcatagtaagtgaagtgttgccacgcgaaaagcttcttccacgtgcttgggaacttgcagaaatgataatgcaggcacctcgttcagcaagacatcttactcattcaattttatcacgtccttggaaaaaagccttagtcagtgatcaaggtttccaacttactcaccaaatgtatgacatggctattgatgaagaaggtgttcttgaaagattgacaaaaatgaaagggcgattaatgggcaaataaggacaatagcattaaattgatattggaagtaaagaaatagtgatagaggggctatatgcctttaagtataaaactaaaggcaaacggcccctctgttaagttttttaagaaatgctggcattttttctaaggaggaatcgaaatgtctgatagatgtatggtggggcctacaaggttcgaagaatactctgagaagtacaaagactttttcataatgactcgccgtaacggcataatcgaagtacgttttcatactaatgggggaccgtttcaatttgactggccgggccaaaccgcatatggtaatgtatggtcagatattggccgtgaccctgaaaacgaggtgatgattcttacagggacaggggatttgtggcaaataggaaatccagaagtctggaaaacaaaatttatggattggccgaggaaccgtaagctggaaatgtatcatgaatccttgagaatgattgaaaatatgatctattgcatcgatattccaacaattggggcgattaatggtacaggatcacactggcaactgggaacgttttgcgatattacaatttgtgctgaaggaacagaatttttcgatgcacattatcttggtggtatacctcctggagacggaatcgttttaacacttcaaaatttactagggatcaagagagcggcattttacgcatacacgggtatgaatattaatgctcaagaggcattgaacctcggtatggttagtgaagtactgccacgtgaaaagcttcttccacgtgcatgggaactcgcagaaatgataatgcaggcacctcgctctgcgagacatcttactcattcaattttatcccgtccttggaaaaaagccttagtcagtgatcaaggtttccaacttactcgccaattgtacgacatgtccattgatgaagagggtgtgcttgagagattggtaaaaatcaagggacgttttcaggggaatgaaagatagtccatttcgttaaaaggatttggtaattactcgttttgtccgattcggcgaactagcctataattagatgaatatattggtcaaggtaaaggaaggtcttttgatcttcaaacagtacagaggaaggagataagggcgatatgaaatcattgatagaattatataagattggcagtgggccgtccagttcccatacaatggggccggaaaaagccgctagagtctttaaagcagaaaatgagggcgcagaacgcttcaaggtgttgatttatggttcccttgcaaaaacgggcaagggtcatatgactgacaaggctattattaaggcactgtcaccagttccaactgagattgaatttattacccacgcagattttattctgcctcatccaaataccattgattttttagcttacaaagatgggcggcaaacaacatccatgcgtgttgtaagtgtcggtggtggggatatagttatcgatgggcgtgaggagatgttggtaccggatatatataaggaaaataccttttcagaaatcagcagtctctgtaaagcaaacaacatcagcctaagcgagtacatagagcagtgcgaaggcaaaaagatttgggattttctctatgtaatctgggatgctatgaagcattcgattaacgaagggcttacatccacaggtgttctagaaggcggtctcaacgtagaacgaaaggcgcaatttctttataaccagcggcatattgatgagagcccagagacgcgagaaaacaggattgtctgtgcttatgctttcgctgtcagcgagcagaatgccgccggtggtacaattgtaacggccccaacctgcggcgccagcggtgtggtgccggcagtgcttcgttatatgcaagagaagaaacatgtcacggacgaacagatcatcagggctctggcagttggaggtctaattggcaacttaataaagcagaatgcatccatcagcggtgctaaatgtggctgtcaaggggaagttggtagtgcttgctccatggcatcggcagctctttcagagctgtttggaatggatatcgatcagattgagtatgcagcggaggtcgctttggagcaccatttggggttgacctgtgatccgatttgcggacttgttcagatcccttgcatcgagcggaacgccgtggctgcgatgagggcgataaatgcgatgagtctagcaaatttcttgtcaaacacccgtaagatatctttcgatttggttgtacagaccatgtatgaaactggcctggatatgagcagcgattaccgtgaaacagcagatggtgggctcgccaaactctacaaaatagacagctaaactcagacataagcgtcctcctttactggtattcttgcttagaatatatgctaaattgctgtcacaaatcttaagtattatataaatataaagtagttaaacattatttacccctattaaataaatattaacaagtattcagaatggtctattacaccctagtagatcattctttttatttatagaattagattagtttaatttgttacataacaatattgatataagaataataaaaacttgtaagtgaatgcagttacaatataataagtatataaagtaatattgaatagttaaaaattcaaagagaaaatgatgtgatgtaatttgcaaaaaagattgcattgctttgcaaagaattaagaagaaaatgccaatataattttttgaccatcttggtattttgtaaaaattaatgatattaatggaaaaagtttggattagtaaaaataagtttatgatataattaggtaaatttataaaaaattaggataatagatgaaatattttggcgaaagttataaactataaataagcgtataattttttgtttaaataagttataaggggaatgattttaatgataaaagggataaagctaaaagtaatgctgccattaatatcaataagtttgttttttattgtgtttatggcaatacaatttaattctacaagtaataatttaaaaaaggtacgggaaattaataataaatatttttatacaagcactaaagctgatgaactaaaattagatgttgtacaagtccagcaattccttacagatattagcgcgacaagaggcgcaaaaggctttgatgatggttttgatgatgcagaaaaatttgctaaggatctagaaagtgttttaagtgatcttaaagaaaaaaatccagaaagtgcaagtaaattagataatatacaaaaaagttttgaaccttattatgaaacaggaaagaaaatggcgcaagcttacatagacggtgggcctgaaaaaggaaatttatctatggaagaatttgattctacttcagaaaagattaatgaggaagttgataaatttaacgaagcagcagcaaaaaacattgaaatatctataagtagtatagaaaatgatataagaaatacaataattttaatgggaatatctgttctagccttggtaataatatttgttataacttggagatatatatctaaaaatattgttacaccaataactactatgctttcaaaacttaatgaaatgtctaataatggcggagatctaactcaaaggattgattttcatagcaatgatgagattggtgaaatggcaaaaagttttaatttaatgcaggagtcttttaggcagattatcaatgtcgttattaatgaatcaagaaatgttgaaaataaagttgaaaaaactaatgaaaatataggtaagttatctggattaatcgaaaatgtttatactacaacagaagaattatcaagtggtatggaggagacagcagcgtcaacagaagaaatgggtaatactacatatttaattaactcagatatgatgggaattgcacaaaaggcaaaaagtgaagctgagaattcgaagcttataaatgagagagctaatgaacttaaaaataaagctgttaattctatggaaaatgctcaaaagattaatttacaaactcaaagtaaattattagaagctattgaaaaagctaaagaagtagaaaagataaaggccttatcagaagctattttagaaattgcctctcaaacaaatttattagcattaaatgcatcaatagaggctcaaagagcaggtgaagcaggcaaaggtttttcagtagtagcagaagaaattagaaatcttgcagaagattctaaaaaaactgtatcagaaataagtaatattagtaatattgttatggtaatagtagacaacttagtttctacgtctcaagatatgataaaatttattaatgttgatgtaataaatgattatgagatgattgttaaaacaggagagcagtatagtaaggatgcatctatggtttatgatatgacaacagaatttagcaataaatctaacagtattatggattctatgcttagagttgcggatgcagtaaaacaaataaatgattcaaatactgaattagctgatggaaccaataatattgcagaaaatatgaatactatatctgaaagttcaggaaatgttgctgaattaattaatgaagttaatgtaagcactaataagctagttaatatggttaataattttaaggtataactatgattattaaaaagaaataagtgcataaagaaaaaacaaatgaatttaggcggtttttaaaaatatttcttgatagtaaattgttgtgtcataattaaagttttcaaggatgaatataagaaggaggaagagttatgtcaaataatgtaaaacagagaagaataattttagatttagcaactactttagatggctttattgaagggaaaaacggagaagttgattggtgcattatggacgctgatatgggattcactaatttcttaaatgaaattgacactattttatatggtagaaagagttacgatttatggggacaatatattccacaagatgaagattcagatgatgaaaaagaagtttggaaattaattcatagtaaagagaaatacgtgttttccagaacacaaatagctaccaataatcaagcaacatttataaatgaaaatattcttgaagaagtaaataaattgaagaataagcccggtaaagacatttggctatatggaggagcaagtctcattacaacctttataaatttagggcttgttgatgaatttagattatctattcaccctgttattttgggagaaggaaaaccgttgtttaatgatataaaacagagagtgaatttaaaaatggtcaacaccagaacgttctcttctggcgttgtacaattaatttatcattggaatggtaattaatttttaacagaactctctgtatcaatagctattccaagcttagctgatattatggtatttaacttattgattgagcttgataagctaacaatttgtttctctaaacgaattagcaaataggcagataccgctactggaaagccattattaacaataaggttaattaactcatttacttccataaatccatcacctcttataagggatatatgatataaaacgtattatttcacgttagaaaacaaatattacataaaactaaaatatatacattgcataaataattcttcatgataattctaaaaatattgcaagaattttagaatataaattcttaggaatttaagaattttacaatataagaatatttattctttataacttaagaatataaaaggaaatacgactcacagagaaagttctgcacctataaattaagcagctatgctgtaattaaaaacttttcacttatagccaaatataaaatgctcatagcgaaagttctctacttaagaatttgcttgtaaaatgcgagttaggagattagacatacaaattcaatcattattttaatgttatgttacagcataaaacatatatccataatagcagctgctaaattttaaggctgtaaataaattattggggtgtgttgtaaaaatgattagagatgaaattaaactcaactcagaagaaggagagtgctttgataaaaagcaaatagctttagcaattagaaattctacttttaatgatgatttaaaatgttctttgcttgaggatgagatattagataaatgccagggctgcagcctaaaatgcatttgcgatagaatagatcaagttattgaagattatgtggagaaaactacagaggttgtaaataattttagttttgaataggtaaatgaaatattagtattatcatcaagataacagctctaaggattaaccttagagctgttatcttgattaataatacaatgaaatattattaaggattttcattaaaatgtttttctttttttgaatggcagttgagtagcacatatttttaaaataagcatattcctttacagtgtaatttttatagaatacaaaatctataagttcgacttcctctttatttaaattcttaagggctaattttaaatcctcatagtcgcacatctcacataatgaagtttcagttgagatttcaagttctggaaaatcattttctacatcatcatgtaagcttaatgcataactaccttcagtagatcttctggttctagttcgctttattagatcattcatattatttttaatagcattggtagcgtaggcaacaaatctatgcttttctaaattatacttggaaacagatttgaaaagtgaatggtaacattcctgtataatatcgtggaaattatacctatcaatgaaagtccttttagaaatattataaatcaaaggcctaaattcataagctaatttttcttttgcgtcttcatcattattcttacatctggtaactaaagtttcaacataatcaaaatccatataaacctccatcttcaatataagagttatgaataaaagtaattattttacatatattgtgttttatgttaaaattacctctatatatagtatatatggttaagttacatataacttatatagaaaagtaatattgagaaaaaattttttataaggaaacttagatttataatgatatataacttatgcttaattaggtaggctatcattatttgattctagaatagagtttagttatgagcatattaataatcgttatgacaggtactgcaaatgtaagagttatagaattttattaatctaaatgatttaagtattgttgggaatttgaaagataagtgaaacttcaattatgtatataatgggaagttgaaaagaatagataaaaaataaccaatgataagaaaagcttaggataatgaatggagaataatatcataagtaaatgataatttattgaaatttgatgattagttaaggagatagcctatattatatgaattataatataggttattttttgctttggaacactttattcttaagtgtaattgaggcaaaactttaatgtaatcgagaacatatattaataaaaaaagttttttaatatttaaaacaaattttgcttacgaaagctaatgaaacattgctacaattacgaagcaagtgttgtatttgaaaaaaataagtaatgtaaaaggagtgattacaatggatttgaaaattgagataaataaatcaaaatcagcggctatgactatttaatctatggcagaatgcgctattttgattagtttgagtgagaagaaggggaatacctaaggaaaattgaataacaaattaagctaataatgaatcaataagactgagttaaattttaacataattattagtgttacatttttatgtgatcaattatttagatcggtctaatttatggagggaactatgaataaaaaatataagttagaaagtaatcaaggaataaattttataagtattattgctatattagtagcaagtgcctttgtggcaacttttaatgaaactatacttaatgttgcattatctgcaattatgaaagacatgaatgtatctgctggaactgttcaatggcttgttacagcttatatgacagtagcagcggtaatggtacctgttactgcttttcttattcagtcatttaaaacaagaaaattatttttaagtgcaatgggattattgcttattggaacaatatgtgcagcattttcaaattcttttgctatgttattaatttcaagaatgatacaatcatcaggtacgggaatgataataccaattatgatgaataccatattattagtggcaccaaaagaaaaactaggaatatcaatggcaatttgtgtgccagcaattttacttggccctgcatttggtccaacagtatcaggaattgtattacaatattttagttggcatgcgttatttataatgttaataccaattgtatctataattatgattctaggttcactgttcgtagtaaatgtaggagaattaactaagcctaagatggattatttatctattattttatcgacaattggagtaggtacaataatatatgctataagcagtataagtgaagggaatattaagataactttaataagctttataataggtattatttgtttgatattatttataaaaagacaaaatgctttaaaagaaccaatgctaaatttatctccgtttaaatatcctaaatttgtaataggaacaattttagtaatgatagcaatgatggttacttttactatgagtataatgttaccaatgtatatggaaggagctcttggaaaaacaagttctgtagcagggttagcattattaccagctgtaatttgcgctggactagcagcacctgtaggagggaaaatttacgataaatttggtgtaaagtttttaataccattaggaacaggaatagtaactgtatttgtatttttaatatctttgtctaaaagtgatacatctttagtgcacctagtaataatctatatatgcatgaacataggagttggaatatttatgtctccttctcaaactcatggattgaatcaattgccaaaagaatattatcctcatggagtagcaatagtaaatacgcttcaacaagtttctgctgctatggggtcatcactttttattggaataatgtcagcagctcaaattaatgcattagaagtgcaccatgcaactaatgaagttgcaatagcaactggattttcaactgcagcatttgtagtttgtggatttgcatttgttggattaattttgtctttcttctttggtagaaatatatcacaagtcaaagataaagaacaagtaggatgcacaacgagataagctaaaaaaagccgctagtcggtttaatactacatcaatatcgtaatataatagttgtttatccgtgcgtatagtctgtaagaaatcaaatatatggttatagtatgttatttaagtcacttagatgaaagaaagcgatatatgagttaaaatgtattgtcacttgctattgacacggacaactatatcataaataaaatacagtttttcattattaatataattagcattaagggagtgtcacaaaatgattaaaatttaatcattttgcgacactccttttttatgtatctgataattgaattttctaattatacattatagtgaaaatgtttcagtttcaccgttgatagaataaatagaagctgttcctttagtgaagtataaaacagcaaaaatcccgtcatcaagactgtacatgcgttttaaagatggatatgcttctagtgcaaattcctttacttcacgtctatcatcatttgcaacttctccagcaacacgaatccattgaccttttttgttcatagtagagatttcaacctttgggttttgtaacatttgcttaaaacaatcttttttgttgttagtaacaatatataatttttcttcatattcaaaaacagcgccaaatggttttactcttggttgatcaccctcagtagtagctaagtaaaaagtaccactctcttttaaaaattccaatgcttttttcataatgattactcctcctatatctgtatgttaaaattgattatgcaataatgataacatgtatagtataaataacaagtacgatttttatagcgagtaagtatcaattaggatactatatatgtttattccttaatttcaactggaacacttcgggaaacgttatttagctaaatgtacatgccttctttgtggtaataaggttttaggctgcagttgatagaaaagatgctactatagtttttggtgtagtgtgcaagttgagataattctgcatatgtagatatatggatttagctagttaaattgagataatagtaaaaaagtttttaaaagcttcttcacaatcatttgggaacacttctttgcgtatttgtgctttcttttcaggatcggcgcttgtaattacttttgaataatctccgaattgataagtatcaaaacttaaaagagcttctgaagaaccaaatattttagtcaacatcatttggttaaaattaatatgatgatcccagccttgtgctttcaagatttcctcttatagatataatagtcacctttaggtgcctataccactttgaagtgcttactttacagattgtttatataaccgtattataaaaacatagatagataatatccaattaattacatcgaggaggctttctctatgaaagaacttactattaaaaatttaaatgcaattgaagcaattcaaagaaaacaaaatgataatgaattttacattaaaccagtagtcgctggttctgatgctaaccaatgtacagtatcatttattgaagtaccacctggaaaccaagcatttggttaccattatcacgagaaaaatgaagaggtattctatataattagcggggttggctcagttagaacacctgacgggacaaaatcagttaaggcgggcgatattataactttcccagcaggtaaagaaggtgcacatgtaattagtaatgcttccgatactgaaaatcttgtttatgttgattttgacacacacaacgtacctgaagttgttagcttaccagatagtaaccaagtaatggttcttggaaattatatacaaggtacatttaacatggaaaaataggattactagctaaaatagtactaagcttttgaaagctatggtactatttttattgtatattgaattatagattagcatttattctctctttatattgatttccccatgtaagcatagaatttagtacaggctttaggctcattccatcttcagtaagtgaatattcgactctcggcggtacttcagcatatacagtcctttctacaagcccatcttcttccatttctcttagctgctgtgtaagcaccttttgacttatagaatttattgatttcttcaactctccaaatcttttagttccattaataaggtctcttaatattaacactttccacttcccacctataagtaataatgttgtttcaacggaacaagagggtaattcttttttcataaattgcacatactttcttttttatattttaagataaagagtaaatatttggtgatttgcactttagcatctatgtattaaaatgctaaaaaactattagttactttttaagtgttatagtattttgggatacttaattataatagtatactattgaatttattatatagcaacgctctttggaaatttaataatatttataatatagctataattaaaatgaaagagttgttaattagtactttatcttttgacatatcttcgttttatctttaagtttattatgtcgcaacataaacctgatttttaaaaatagaactacttataaacatgtaacaaagtgaccaaaagaagagccaccacttattaaaatgatgactcgtcctgtgacttatttatttaggttgtttgggctgcatagcagatgctttcattgaatgtgcacgctaaacttccagctgttaccgaaagttacattcttgctttagaccttacacaactgtaagcacgattttgccttgaatgtgcccgcggacagccctctcgtgcgccttgcgagcatcagcaagtgggaacgtactgtcaatggcaacacgtactgtacctgaatcaagcaggcggcccaattctgagagttgcgaaccgttcgagcgaacttggagcattgagactgttacactaagctttgcaacctcctcggagtcagcggaaccaaagaaaatcggaaacaaagcaccgccctgcttgagtgtgcgcaagaaacgaccggttgtgggaccgccaagggcgtcgataacgagatcagcgtcatgcacgacatcctcaggaaggttcttggtgtagtcgatgaattcgtctgcaccaagttcgcgtaggaacgtctcatgcgcacctgatgccactgcgataacatgagcccccttccatttggccagctgtacggcgaaatgtcccactccgcctccagcaccatttataagcacagtcttgccgctgagcggcactgggcgatgcagcgccggttgaagcgggtttggttcattatgcccaaggtcaatcaagtactgccatgcagtgagccctgacatcggcgccgctgctgcatgcacgtgatcgatgccagcaggcttgagtgctagatccgatgcaggagcagcaacatactccgcataagcattactcccatgtttgggaaaacgaaccatgccaaaaacgtcgtcgcctatggaaaagtccttcacatccgcagctacagcctcgacaactccggatatatctgtcccaggaatgtaaggtaagggtacagtcggcctcatctcgggaggaagaatcttcatcccttcacgcacataccagtcgggtggattgatgccgattgcgtgaacgcgaacgagcacctcgcctgtcttcagttcaggacgcggcacatcctcgtaacgtagtacatcaggaccgccgaactcatggaatcgaattgccttcatagtatttggtgaaatatctttctcattttgaattgttgtaatcataaaatttcctcctattttcttaatttttgagcactgtatcacttacatattgtttgcttttgatgtatagtgttattatagttttataggtaagaaaataacaagtacgcacaattttgtgccttaaaatcggaggtattactaatgacagatcaacaaggaaacaagataatttattacaaagacgaatgtcacattattgacgctcttgaaatcattggtggaaagtggagactgcctatcttgtttgttatataccgtacaaaaagcattagatataatgaacttaagcgaaatatacctggaataactaatattatgctaacccgttccttgcagtctttggaagaacatggtcttgtgaaaagaaaggaatttaataagattcctcctcatgtggaatattcgttgacggatatttgtaaatatttagagcctgcttatgaagttttaaatgagctgggtaaaaaattgtcagagcaacattcggataagatatagctaatcgtccaatggaaggcttttggggcattctaaaatctgaaatatactatctaagaaaatttgatacatttgatgaacttaaaaaagctattgatgaatatatagaattttataagacaagaagactacaaaataagctaaaaggtatggctctactagaatatcgaaatcataccttagtagcataatttttattatgtcccttgtatacttaacagggagcagttcataaacgcatttaaaagctttataaaaaagaataaacaaatgaatgaaaaattggatatcattttagatacacttgaagaaaacaagaaatgaatttaaggtgtttttttaatatttctccatagtaaataattgcgtatcaccttggtattgcaacttttgtgaaattatttaatttagcaaaggtaacaaatgtgttgattaagttaaccattattattaaactaataataagttaaatcactttgccgactattttgaaaagaaaagaataacagtaaggtattattcaaaaataaataaatggaggtagtctcatggacaaagttaatatacgtaaagaacttaaatctattacagaacattggtctcagaaaataatcggtgaagccaatggtcaattatttaaacttgctaaaggaataggtgaaacaagatggcataagcatgatgaccaagacgagttattcattctttacaaaggtcatttgactatacaattaagagataaaaatattgagttgtttgaagatgaaatgtttgttatccctaagggagtagaacattgtcccaaagctcttgaggaagttgagtttttaattgttggattaaacattacttcaaatgaagcaggtggaaaaccaaacctataaatatacaaactgtttactgtcctcataatttgaatcatattgcttcaaaatttataaattataatacagattattcttaatttgtgtatcattttataatttaaatttaaattaaactacttactttaggtgttctaatacaaataaatttaaaggcgataaacactaataatcaatgtttatcgcctttttacttatgccactttatgagaatcatcagtagaactctctgtatcgatagccactccaagtttagctgatattatggtatttaacttattaattgaacttgataagctaacaatttgcttctctaagcgtattggcaaatatgcagacactgccacgggaaagccactattaactttactatcagagctagtttgaataatattagtatcagaataatcaaaagagaaggaagagatacagtcaccagctataggagtttcgctagtaaatccatatattcaccttcatcatattcaaaatcatttttaggtttatttttttgtatatagcgctgtaataagcagttgatattttataaagttattgaaatattcaagatttattagcttaataaagaatatttcaataatgattatgacattgattccatggccattgtgacgctttccttatagaatgaaataaaaaaatcttaataaatcttaatactttttttgataaaagcttaatatttgtattttatactatccctatattaatcttggaggcaaaatataatggatattagtaattttatcaaacagtatataaaaaatcctaaaacagtaggtgcggtagcaccaagttcagagaaattagcgcataaaatggttgaagacattaattttttaaatgcgtcatgcattgttgaatatgggccaggaacaggagtttttactgagaaaatattggacaaaaagaaagacagtacaatatttatagcaatagagtataatgaagatttttataagatattaaaagagaagtttaaaaacaggacaaactttgtacttataaatgactcagctgagaatttgaaagaacatctaaataaatataatattgataaggttgactatatagtgtcaggacttccatttgcaagtttacctgattctatgagcaaaagtatattgtcagtaacaaaagagatactaaaaggccatggagtatttataacatttcaatatactttgttaaaaatcaagctttttaaaatatattttggtaaaattagaaggaaaagagtgttattaaatctgcccccagcctatgttttgaaatgtgaaaattaaaagaagctaaaaatgatctactaatttcaaaggcaagatcatattcttttccataaggacattccgtatcttttttgcagttttagaaatgttatcaatgtattattcccaatatagagtgatttttatattttaaacgctaatagataaaaagaaatagttatagcatatgacgtgggcaactattgggttataagaatatgtttgaaaatatacttaaatatttaaaaatagaaagaataagtaatgaagataataaaatttaaatgactgaattattcaaattgtttatagaatcttattggagtaaaatttctataaggatgcattataattagtggaatagtttttagtcttttcgggaaggcgaggtatgaatgaaaacaaatattttagttgtagatgatgataagagtattcgtaatttaatcaaagtttatcttgagaatgaaggttataatattatggaagcttcaaatggagcggaagctttgattttgattaatgaaaataattttgatttaattattttagatgttatgatgccagttttagatggcataagcgcttgccttaaaattagagaagattacactatgcctataatatttttatcggcaaaagatgaagaaattcataaaattgaaggtttaacagttggcgctgatgattatattactaaaccttttggttctatggagcttatagctagagtaaaggctcaacttagaagatataaaaaatttaatgtagaacctcaaaatagtagtagtattactattgaagaattaactattaattttgatactcatgaagttacagtgagaggtgataaaattaagcttactccaaaggagtttgatatattggagtgtttagctaaaaatagaggtgtagtattttctgtacaaaaattgtatgagactatttggaatgaacaatttgcagtatcagatacttctatagtggttcatataacaaaccttagacaaaaaattgaaatagatcctaaaagcccaaaatatattaaaacagtttggggagttggatataagatatgaagaaagggataatcaacaaagtaggaataaaattactgatattaattcctatcgatataataataagtttattatttttgggatttcttcttaatatgcttcatagaataattggtgacaatattgatttttacgaaaaatatggagctgtcatagctatcgtaagtttcgtattggaattagtaatttttatagttatttttctgattgcaattaatggaaggattaaatatttaaattatatcagtaaaagtgtgactaatataaagacacagcactatttaaatcctatagagataaagggaaatgacgagatttttcagttagctgaggatataaatacaatgtctgagagacttaaagaaaattatgaaaaagagaaaaagcaggaagaggctaaaaacgagttgatagttgctgtttcacatgacttaaaaactccactaacatctgttattggatatttggaacttcttaataaagataaagaaagttttacagaaaaacagcaagagtttttaaaagtagcttatgaaaagagtggaaatttaaagaagttaattgatgaactttttgaatatactaagctttcaaataactatgtgaaactggataaagttccatttaatatagctgttctagtaaatcagatagtgggggagcatgttttatttttatctgaaaagaatataaaggttgaaattgaatgtgctaaaaatgaattgatttatgaaattgatatgcaaaaatttgttagagttattgaaaacttagtgaaaaatgctgaaaagtatagctataaagattcaacttttaaaattataatgtgggatgatgaagagaatattaaactttcctttattaatgaaggtgataatataaatgaagaagatttattgaaaatatttgatgaaatgtatagaatcgataaatctaggaatgctgaaattgagggatctggcctgggacttcctatttcaaagaaaattattgaacttcatggaggtagaatttgggcagaatgcaatgataataaaattaaatttaatattgaattacctaaaataagtgaatgagaatagattagaaaagttcataaattagtattacatatacaaaataaggagttcttagagctaaagaaagcactgagagctcttttaatttttgtcaaaacacttcttctagttttgttaagaaaagattaattatttaagaaaagatcttaataattcttaatgttttcctcgaaaattatttaataaataagatctataataaagtcagattcagaaagtagttatttcaaatattgatataactacatattattataaaaataactttaagaatggagagattaataatgaataagttatttaaatgtctggcttttttattttggatagcaatattatttgtatttattaaatatcaattgtatattaatggggttgcaaaaattactggatttttggaagcatatcctaagtatagtacgttattatttttaataattgcttcatttaggatctttacttttattccttgtactgttttcattgttagtgctggaatattatttgatccattaaaagcatttgttttagttgccatagcaaacttgttgagtgagattcttttatttttatttgttaaagccacaattggtatggggtatcaagaaaagataattaataagtaccctaaaatatattcactaattcaaaataataatgttaaaatcctagctttaggtgtttcgtcacctgtagtaccgtcagatatagtatgtttcttttctactttaactggaatgtctttcacaaagtatatcttaactatatttgtggctgatacacctgttatccttctatatactttcctagggataagcatgaagtattctctatatgtatttattgctacatttattgttgtaattctaatgagctatataaattacaggagatggaatagaagcgttaatttttaaaatatgctagtaggaggagaaaatatggagtctaattgtagtattacttttgctgtgttgacaataagtataagcactttttatatagtaaagttttggtttactaagaagaaataaatatatagatttgaatataaatatttctataagaaggaggcaatttatgtcaaacaaaatcttaatagtggatgaggatagtaagataaggaaagttgctagagtgtatttagaaaaagaaggatatgatgtattaagtgcagaaaatggagtgcgagcgcttaaagaagtatgcgaaagtgaaattagccttatactaatagatgttaagatttttactatgaactggattgaagcttgcttaaaaattcgaaaaaataatgttatacctattatttttatgtttaaggagatagaaaatattaatgctgttcaagtcttgccatcagtaatgggcgattacattaaaaagccatttaattctgaggaacttatagaaatagtaaagttgcggatcaaaagatataaaattagccctagttatcaaaaattagataaaattaatattaaaattggaagtttaactataaatcgtgatacaagacaggtatttatagcaaacaatactgttaggcttacacaaaaagaatttgatatacttgagcttcttgcaagcaacaaaggtatagtttttagtatcgaaaagatttatgagaagatatggggagatgtattttttgaatcagataatactgtaatggttcatataaggaagataagagaaaaaatagaagaggaacctgaaaatccaagatatattagaacagtatggggagttggatacagaatatgaaaaagctattagtacgtgaaaaattgagttttcaacttatagttgctattgccataagtctttttgtttctatgggggcatttttcgttttggaaagaaatttgactatttattcaatgaataatgaaggaaatgttgagtattttttctcttatatgactttttcaataacatttatagttcctataattatttttataattacgtttctacttttaataagaaaaaaagtaagatatatcaaatatatttctgagcaagtaaataaagttaccaattacatatcattatatttaattataaatctatgtagaatggcttaaattctaggttgcaagaatatggatatttataacaaagtatattgatttagaactcagtcaggaaaaagtcgggaataatcggggaagtcttatggcgtaaatcattgattattgaaggcatcctacataataacttgaaaattctattctattttaaaatagaatagagatgaaaggaatatgaataaatatgatttctagaatattaacattaacaattatatgttttatagctaaataaattatgaaataaaatatagaatgtataatcatattcatgttcttatcaaggatttagaatgaggagctaatatagtgtattgtgctccttatttgatttttaacatgccaatatatagagttaggaattattgaaataaataatgataacaatttattaaagtggcaataattaaatctatataatagatatagctaaataagtattatcaattaggcagtataaagaaacaaaatatatttggaattgtttaaggttagagatatgagtgctttgacgtttatataataaaggatagacttttgtataagtcatatgtctaacattcggggtgcacttcaaaatgtttatagcctttttacttatgccactttattagaatcatcattatctataacaactccaaacttagttgatattatggtgtttaatttattaattgaactacataagttattaatttgtttttctaagcgtattagcaaatatactgcaacagttattgcaaacccattattaacaataagattcattaattcagttatatccataattttatcacctcctataatggatatatgaaataaagtatattagttcatatttaagaaataaataattatctgaaattaaaatagataaattaaattattgagttccgccttcatttgcaatgtgattatgataataatttatagcaatatcaactatagtactgacacatacattaatatctggatggatgctctttaattcatttatttttcttatggtggaacttctaagggtgtagcttcttttaatatttggagtctccccatcaatggcaggagtggcaccattaggtagtggagttcttctattatcaaataagtcttttgtagaatttaaagtgtttttcatttctgtggagttagttattttattttgagctttgcttctagtatctgaagcagtattaacatgagtattagatttaggagcttcttgaatatcaattccattattagatttatatttagaattagtttgaatagtatcagtgtcaaaatcatcatcaaaagagaatgaagaaatgtagtcaccagctataggagcttcgctagtaaatccatatacttcaccttcatcatattcaaaatcatttttaggaacctttgatgttcttcttctagccataaattattcccccagttatcagtatttttatgtatcctcataaaagatatatggttatttattagagattctaaaattctaaagaatttatatataatgatcctaattgcagcatagctgctttttttttaaggtgtatattttttagaattttagaataaaagaacttaagaataatagaatttaagaatattagaacttaggaatataagaatttgcttgtaaaatgagggctaagagattagacatgcaagtttaatcatgattttaatgttatgttacagtataaaacatatatcaataatagcagctactaaattttaaagctgtaaataaattagtggagtgtgcttaaaaatgattagagatgaaattaaaattaattcagaagaatgcgagatttttgataaaaagcaaatagctttagcaattagaaatgctacttttaatgatgaacttcaatgttctttattagatgatgggatattagataattgccaaggatgtagcttgaaatatatttgtgatggaatagataaagttgctaatagttatgtagagaaaactacagaggttgttaagaattttagttttgaataaggaataaaagaaattaaataattaaatttagcagataaattaaaaggatgaaaatatatgtcttttttcgatatattcaaatcagaatcctcaaaagttgaaattgaaaacttaaaaacacaaactctaaaagctaaggaaattattataagtattattccttttgtagatactaaaatcgaaggatataaaggtaaagtcccagaatttgtataatattcataaggagtgttataaataattattctttatgatatgattttatataatacggtaagtaggagggaacttatgagtaaaaagaacaaaactataattagcgtgttagtagcatttttaatattagttattggtgttttcaaatttagttttagtagtggatataaaatatctattgaaaataagactgataaaaccattgctaatttagaattaaaatacaaaaacggtaatactataaaaactatttcacaaatagagcctaaaaaatcattggaatataatattgatactaatagtattcaaggtgaaaatgcaataattttaacatacaaggacaacaaaggtatttcttatgaagaatctgtagtagggtacttagaaaaaggttatagtggaaaatctaatgtatttattaatgaaattgataataatggtaactttggaatagagattaaataaactaagtgtaaaaaagtatagcataaaagatgtcatacttttttatgatttaatcaacaatttaatctaacagagtcttatattaattaaacctaaaagtaaaaattaattatgcttataaggaggagttttatgagggttgtatttttaacactggggagtagaggcgatgttcagccatatgtagctcttgctaaagaacttataaaaacagggcatgagtcaataatctgtacaggagcaacttttaaaaattttgtacaggaaaacggtgtggaattttataaagcagaatcagacttaatggccattcttgagagcgatgaagggagagaaatatttaacggtgggagatataatatctttaagatgttaaaatatgctaaagaagtaattaacccagcatatagaaagagtatggatgatttttttgcagcttcgaaaggatgcaatctaattatttatcatccaaaagcattaggagcagttgatattgcagaatatttaaacataccttgcatttgtatgccaccagttccaataatatatccagttacagaatttcctaatttagctatatctcctagtaaaaattttggaccttttattaataagctgacgtataaagttaattcctttggtgaagcatcttatatgaaatatattaatgattttagaagcaaatcacttcatttaaaaaatagaaaggctggagagcttttatttcaagtaaacggaaaagatattccggtagtatatccaattagtccgtttctatttaaagaagtgaagagttggaaggatagagttttaatttctggatttttcttcttagatataggtgaaagtagaattgatgaaaatttatatgagtttttagagaatggtaaaaaaccaattgttgtatcttttagcagcatgcctctaaaaaagccaatggtgtttaaagaaaagctcattagagctttgaaagaaactaataatagagctatagtattaattgggtcaagtggaatgagatttgaaaatcaagagaatatttttgaagtggaaaaagtacctcatagacttatatttagtaaagcaaagggaataattcatcatggaggaataggtactacagcagaagcacttcttagtggggtacctcagttaataattccatttacagtggatcagccattctgggcacatagattgttttcaaaagggtattcagtaggtactttaaaagaaaaaaatctagaatcgtttgatttaataaaagcatttaaggacatggaaaataaagaatatataagaaatgctaaagaaatcaaaaatattattgagtctgaaaaaggattagaaaatgcggtgaaatatatagaaaaagtgtataaatcattttgaaatagagataaaatctttaatattaaagatgaataagtaaaccttattcatcttagattcagattagaattgaatgatagcataaatataaattgactatataggaatattaatgataatatttagtaagaagtgtaaagttggttataatttaataataaaaaaagatgaataaatataagtgattgaatttgtatttattcaagtttttttatgataatcaaaatattacataaaaatattaaggcgcagatactgtaagatatttttaatctttgcaaaattaattattattaattaaatgcttagacaaaataacttttataaaagtgaaagcttttaacagtatgtattgctcttcggaattatgaaaaatttatagcacaaaaaatttaatgataattaagttctatttttgtactcaaaagttcattgtatctttgcatatacaagcttcatcttgaaggaatattgtgccacttaagtggacagattcttctaagatacaagtaagtgaagttgtatttctattagaagaacttcaattgaatcttagaatatatttatgcacttagttacaggttaggagataaaatgataaataaaagcaaaataaaaagcaaagtaaagattatacctctaggagggctaggggaaataggaaaaaatttaactgtctttgaatatgaagatgagatagtaattatagattgtggaatgtcgtttccggatgaagaacttcttggaatcgaccttgtacttcctgatataacgtatttactaagaaataaggataagataaagggattttttataactcatggacatgaagatcatataggtggattaccttatgttttgaaacaaattaatgttcctatttatgctacaaagttaactttagggttaattgaaagtaaattagaagagcataatattcttagtgattgcacattaaatatggttaaaccaggtgatataatagaaacaggcaatttcaatattgaatttattagaacaaatcatagtatagcagatagtgtgtcaattgctttgcatacacctataggaataattgttcatactggtgattttaaaattgactttactccaattgatggagaaattatagatttgcaaagatatgcacagctcggaaaaaaaggagtactgcttttaatggctgatagtactaatgctactcgttcaggttatacaatgtcggaaaaaactgtaggtgaaactttaaataatctatttattaaggcagatggaagagtaatagtagctactttcgcatcaagtattcatagagtgcagcagattgctaatgcttctataaaaaatggtaggaagattgcatttagtggaagaagtatggaaaaaatatctgaagttgctatgtcactaggatatttatttataccagaagaaatgataatagatttaaatgacgttaaaaaatatccagataataaagttacaataatcacgactggaagccaaggtgagccaatggcagcacttacaagaatagcagcaggcaatcataggagtattcaactagaaaagggagatacggttatcatatcatcaacaccaataccaggtaataaaaaggctgtatcgagtgttgtcgatgatttaacagaaaaaggtgctaaggtaatatacgaagcaatagaggatatacatgtttcaggccatgcttgtgagcaagagcttagattaattcaggcactattaaaacctaaattttttgtaccagtacatggtgaatataggcatttattaagtcattctaagattgcagaaaatatgggtattaataaatctaatatttttatattagaaataggagatgtattagaattagctagaaataaagctgaaataactaacaaggtaccagcaggtagagttcttatagatggcttaggtgtgggtgatgtaggtaatattgtacttcgagatagaaaaaacttagcaaaggatggtattataacagtagttattgttataaatagagaaaatagaaccttaatatctggtcccgatataattacaagaggctttgtatatgttagagattcagaagatttaattagagagattagaagaatagtttttaaaagtgtagagagatgtcttgataatgatgtaactgggtggtcagaaattaaggatgctataagaaaagaagtaaatacttatgtatatacaaaaatgaaaagaaaacctatggtcttgccagtaattactgaaatataaagcgttgaatcaaaatacagattttttccactcataagtcctttttccattgcgtaaaatactatattatattgcataaatatagaaaactaaagactgctaacactttatcagaagtctgaagcccaaaagggcttggataattaaaatatatttataattgaatagataaagttgctgatagttatatagagaaaactacagaggttgttaacaattttagttttgaataggtaaatgaaatatttgtattatataaagataacagctccaaggattaaccttagagctgttactcttttacccttaataatacaatgaaatattattaaggattttcattaatatgtttttatttctttgaatagcagagagtaacacatatttttaaaataagcatattcctttacagtgtaatttttatagaatataaaatctataagttcaacctcctctttatttaaattcttaagggctaattttaaatcctcatagtcacacatttcatcataaactaatttttcttttgcctcatcatcattatccttgcatctggtaactaaagtttcaatataattaaaatccatataaacctccatcttcaatataagagttatgaattaaagtaattattttacatatattgtgtttcgcattaaatttacctctatatatagtatatatggctagattacatataacttatataggagtataaaaataattagatttatgttgttacttaggtttttaatattgaagttcttggttgtagcatatagcttctctttaaaggttataggctaaaagataggactgttctcaaaaaataatgagaacagtcctatcatatttatcaattcaaataactatatcaatttcacactaagtccaagaaactcccaattaaaaaagtcaattatatattggaatttaataaacttgtccacttattttgtttgttatttctttccaccatagtttttatatgttttatatactgcgtttgcatattgatcagctaggattggtcgaccatatgagtctgtgcaacctggataccagtttggacctccattataatgcaataaaccattatatacaccaccaaattgatcaaccatctcctttataatcaatccacctaatgctacctgatcttgaagatttccatgatcataagttcgtccatatgttgatttaaactttgctgcatatgcatttcttgtacttggttccacttgcattaatccatcaccagatgagggactgccagataagcctgcaccaaaattactctctttttttataactgcacataataataatgcaaaatctccattcttactaaatttcttatctacattatatgcatatttccatatgttacttggaacttcactaggctttgatactgatgtctccgttagattcgcaagttttgctggatttgtagttattgttgaatttgttgttgctgccttagcaagcatcggcatttcagttaatgtaagtccaattactaaagtgagagcaactagtttttttaatttctcgtgtttcataatacatcactcctttaaattttaatgaaaatccataagacacattcaccccataggggagagtgcaactcacaggtatttatttcatgactctttagagccaaaaaatcatgttaatacacttacttggaatataaagatttaattttgaaattattttgattaataacctcaaattaaaacctatattatataaattcgaaaagagtaatttttttcagtgggataaatttagttattttgcaataaaatgtttttagagtctaaattagtttcgcataatgtctagaatgggtagttgatgtaatgggataaaaagaattaatattagaagatgatttaggataatgaatggtgaaccagtgcggttgagcaaggctgtgtaatttaaatggtggaaatccattctgaaaagattaagtcaaatcattcagtagcgagtcattgaaataaataggtaactatttattttaagcgttgacagttaggtagtaggcttgaatgtgaatgagcctcgtaataagtataaattggggaaggctgacggtgtcggttctctggaaagcaatattatagtaggtgataatgacgagtctactataacttcctcggggtcaaagagccaagcatgctatacaatgattacatagcaactcaggagaccttatcagcgctcaaaaaaatgagtataataaacaaccgataaaaaggaagaatattaaaaggttgatggggagtcggataatctcatagtaccaatgatagtgggtaatgccaaagtagggaaggagattacatattattgtcttaactaaggaaacattaactgcacacaggagtagatgaattaatggaaacaaaattacttaagatagcagaaattgctagacaaaatccaaaagaaaaatttacatcattatatcactatattaataaagaaagcacttttcaagtggttaaatcgcagaagccaaaagcgaagttttgatttggagaagtttaaaatgtatatgaagtacaatcctttacctaagcctaaaatcaatgtaaatgtatatagatagcaagttctgtaaaataatatgaggagccgtatgccttaattgggcacgtacggatctgagagggggaaagttcgtgagagctttctctactcgactaccatatataaaattcaaattcctattattcatataattagaagtaaaacatctataggaatataggtgttttttagttttatctagaatgaaattgcgcaacaggacttaggatacaaattaaaaatatgaatttattaataaaaaactatggcgttaaaatggcgttaaaaatagaaaaataccaacgtataaatttctttaaacgttggtatttctaacttggtgacccataggagaatcgaactcctgagtctagaaattaccaattacatatcattatatttaattataaatatctgtagaatagcttaaatactaggttgtagcaatatggataattataacatatcatattgatttagaactcagtcgggaaaaagtcgggaataatcgggaaagttttatggcgtaaatcgttgattattgaaggcatcctacataataacttgaaaactctattctattttaaaatagaatagagatgaaaggaatatgaacaaatatgatttttaacatattaacattagcaattatatgttttttgctaaataatcatgagtaatttattttgatatctctagaaaggaggaaatcctcatctcttaaattaataaataaattatgaaataaaaagtaaaagtagataattatatttatatacttatcaatggattataatgaggagttaatatagtgtattgagctcctcatttgatttttaacatgccaatatatagagttaggaattattgaaataaataatgataacaatttattaaagtggcaataattaaatctatataatagatatagctaaataagtattatcaattaggcagtataaagaaacaaaatataaaaatatatttagaattgtttaatgttagagatatgagtgctttgacgtttatataataaaggatagacttttgtataaggcatatgtcgattataatatcgatagaagattgaataaaaatatagcatagtgctgttatgatatttagaaatttgcttatatatgttaaaattaacttaataaatttaaattatataagtaaaattttattagaggaatagattactataaaaaatatttttacatgagggggtgcattagtgaagcaaataaattatgaagatatgataatgaaaagagcaatggatatatttgcagaagaaggtttgaaattttttggtatagataaaaaagtaaaagatactggatctactgaaattgttgttcttgagataaagaatatgctaatggattatactttcctaatggaagatgatagttacattcattttgaatttcaaactactaacaagggaattgaagacttaagaaggtttagaacctatgaatctctccttaattttcaaactggtaaagatgttgtaacatacgttgtttattcaggagatataaaagatcctataagtgaatactatagtggaataaattcttataaagtcaatgcaatatcgatggctaataaggacggagatgcaatttttaatgatataataaataaaataaatgataaagaagaactaagcaagcaggatattatatcattaacatttacaccaataatgggtggtaagcttagtaaaagtgataagataataaatgcaattagagtggttaaagacatagataaagattacagatatgacgtggagtcaatcctatatgcttttgcaagtaaatttttagaaggtaaagatttagaaaaagtaagggaggagataaaaatgactgaattaggtagaagcttgataaaagaaggaaaattagaaggaaaattagaaggaaagcaagaaaattcaatagaaattgctaaaagagctattaaaaagggaatgagtgacgaattaatcagtgaattaacagaactatctattgagcaaatacagataataagaaaaacaattgaaactaattagtattattgaggaaagtatatgactgaattaagtactatgttaattgaagatggttataaacaaggatttgagcaaggtgaattaaaaaaaaatcaatagaggtttctaagatagccataaatcaaggtatgagtgacgaattgattagtgaattgattgggctatctataagagaaattaaaataataagaatagctattgaaactaataaaacaaaataaatagaattataaaaaggaagatattaatatactttaagcaatagataatgtacgagatatagaacttcttaactaaggtttttagggtctcatatattgtattcagcttaaagtaattaatatctttttattttaactgggtaaggctcggacaaatggtgaaaagtacaacaagtggaaaaacgtattctgatctgatttactttagatgaaccagaagcagcattgttaccttaaaactaatggttatgcttagatattattaatgatgaggttattttctataaaggaatagcataaatattaagaaaaaaggaggattagcaatgaaaaaaatcattcagataattatgagtttcattacaaaaaatattggtggaggtaaaaaagcaaataaagatatagatattcgttttatatttcatttaagaataaaatcttaatggaaaaaacaaaattagtattgaagaggaatttcgtattagaaatggactcttcacttacttagcaatatgatatagataaaatatattgcaatagatttgttttttgctaaagattttattagaagaaagataaaataaattaataaaaatagtatgagtaaagaaagacgataaacacttaaaaatcaaatgtttattgtctttctttatgataggcctcattagattgatttgtatctataataattctaaacttaattgatattcttgtaatttatttatcaattaaaaaagatacactattaatttatttctctaagtgaataagcaagtataatgctacttggcaaaatactcgttattgattataagattaattaaatatgccgctttcataataaattaatatactcataatagatatacgtttatataaatattaagataaagatactaagttttcatagaaaagtatgacatagataatacattgcctatagaggatgcaatagaagaatatggccaatgctccaaggagtaatgctgatacctaatttgatagttaataaaataaattataaagaactaatcaggtttaaagttatacaagcctaattaatatgcagtaagataaaatataactaggaatcctgtataaaatgaataggatagacaagaaataggattagctatagttctaattatattggatattagagaagataagttgtaaataaattataaataattagaaagaataaattataaaacaaatttgaattttacctataatctatgagtagcgtagaacaaataaaagaaagtttattcaagtaaaatagcaggaagtctaaaaatcatacccagataaattcgttaaatttcaaattgtagaatcccataaagataataagttcaaatattttgatgaagttgggaaaacaacggtaataagatatataagagaagctatgctagaatttacaaaatataaaaatgatcagtaagttgaagtaatgaaaataaaagtatggaaatagaaaaagtctaatatattggtattagcaggagtatgtaattaaaaataacttgaaattaaaatatagattgaagcaagaaatgaaagtgctgtattattctagagtgaattatacagcattattaattatacatgaaaattaataattaaaagcttatataccagtgatagagctatttgtacaattaattagaagtgctgtaatttaatttcggtatttaattttaatttgtttttattaaataacttcccattatagacaagaaattaaaagcttttatcctgattattaagttgtgaacaacgattaaattccatttctaatactgtgtttaccgtatgtttacctagatgatctaaagaattatatttttttaataaacattctaattcttctgatagttgtaaatgtgtttttattttgttttcatcccatcccattaaaatagatggagttgtttctaatattgctgcaagtttttcgattttgtcagaaggtatattagagattacgccactttcatatctttgaagtgttggcttactaatagataatcttttagaaacatcttctaatgtgagattcaattctaatcgtctatttttgatattttctttcaaacccattttatgtttcctccttatagcatattaaaagtaagtaaattatccaatatttattaatttaatttattgaattgcagtaaattaattaaaattattctgataaagtataatatctgcctatataatttacagattaaaaacagtaaactaaataaatgatagtgtactttgacattaattgtaattaactaatcttagattttaatagattatattgattatgtatatattttatctgctattgttaataaataaaatatataataatattcatttaccatttaatttgttcagtatagtaaataaattaaattatcatttttaatttattataacatctgtttctggatatgcaacaattattttccattatatagaaaaaattacgtgagaggtattgacaataatagccataatatataaaatattacttaacaagtaacgaaaggggagcatttatgatattaattaatgagttaaaaggaaagatgagagcaaagggatatactcaggaaaagctggcaagggaattaggaatgtctccaaaaactttaggtaataaacttaataaaggcatatttggttctaatgaaatcgataagatgataaaactattagatataaagaatccaatagagatatttttttatgaataaattacttaaaaagtaaattgtaataactttatatatattgtttagaaatctaaaattaattattccaatttaaaagtattatgttacgctaatagttattgttacgggaggacaagctatggaggaattattaaaagaaattttagttgaattaagaaaaaatagtgaaaaagagaatgctggagataaacttacttatacccttaaagagtgttcttatatatcaggtattggtctcaatacgttacaagaagagatttcaaagcagaattcagattttccattctttaaaataggaaagaaggtgatggtagataaaaaactatttcatcaatggcttgaaaatatttctatggttcaccaagaattaagaaaatagtaatcttaaattaaaaacataaatgtaaaattattttcatacaccttgatttagaatgtatggggattcaacttttaataaaaatgtataaaaagaaagtgaggacttacaaatgaattttaggatttttaaatgttatatacatgtttgtaagttaattgagttaaacccatcatggaatggtctcgaaaggtttaggcaattttatttatgggagcgtggaaataatggcagatattaaatggattaaattagctactaatatgcatgatgatgaaaaaatgaagttaatagattcaatgcctaagagggatacaattcattacgtgtggataagaatactcttacttggtggaaaacttaatgctaatggaaaggttttcttatcagaaggaaaacctcttactgccaaaatgttagctgtattattttctaggcctttagaggatattaagattgcattaaaagtattatctaactttggcatgattgaaatagcttctgataaagtaattagaattgtgaactgggataagcatcagaacatagagggaatggaaagggtccgtgaacaaaatagaaaaagagttgagaatcatagagaaaagaaaaaagaagagaataatttagctaaaagtaataaggaagaaactcaggaagatgaagccttagaagaatttatagatttagaagaaaatcaagatttgaatgaaaatgtagaattaaaaaaaactaataatttagaacgaaagaaagattacgctgagaattatactatagaagaaaacagagatctaggtaaaaatgatatactaggaaatttagaaactagtgaagaagattctacaaatactgatattaatgataaaactaatactgatactaatgaagcagctagtgatataagtgcagaaagagctaatagtaatgaagatatcagtaacaatattataggaagtgatgataataattgtattgttactaaaaatatcagtaacgttacacgaaataaaagtaacgttacagtaacggtacagaataagaaagagatagagaataagaaaaagaaaaaagagatagataaaaacatagagagtaaaaagaataatggttttgatataaataataaaagttcaacttgtgatgaagatgtaagtcagtcaagtctctttgagcaacataataatactaaaagtgaatctgtagcagaggatgatataaatcttaaagcaattgagcttatgcagtatcatgaaaaaataacaggaaaaccaggtagttgtgagtatgttgcgcttagatcagctattgatctttacggagaaaagtgggttaagaaggctatggatgttgggtttcaaaaaaattgtccagacataaattatgcaattggaatattaaaaaactggaagagagatggatgttcagaagataatgtggaggtgaagaaaaatggctttagaggcactagaaagagtaacacagcagataaaaatgaatttgcaggattcaagccaaaggaaccacgaaagcttacagaagctgaaagaaagaggattgaagcaaacctcatataggtgtgacaaatgctgcgacaccggatggatacttattaagcaggagcatatgcaacctcttgctgtagcttgtgaatgcaggaaaatagaaaagctaaaaagtgaatggaagtattcaggaatcaatgttgagcaaagtaaacttactttctctagttttgaaatttggaatgaagcgtcaagcaaaattaaggatactgctgcagcttattgtactgagtttgatgaaattagaaacaataggcgcaatagcattttattatgcggacaggttggcagcggtaaaacgcactgcagcattgctgttgcattaaactttttaaaacaaagaattaaagtagtgtacatgccttatcgtgatgtgatcacaaagataaaacaaaacatgattgatgaagaatattatactaggacaatttcaaagtatcaattatgcgaggtccttttgattgatgacctctttaaaggaaaggtcaatgaaaccgacgtgaatattatgtttgaaatcattaattataggtaccttaattttctgcctataatagtcagcagcgaattttctattgatagattattagcatttgatgaaggggtagcttcaagaatatatgaaatgtcaaaagattatgtagtagaaattgagaaggatattaggaataattataggcttaagtaaatttacaatgcacacagcacaattcacaataaacaattacagagtgaaaattcgcattaaaatgaatttttttgagaattaatcaaaattaagttatgaagggaagttatttaaatgaaagcatcagggatagtaagaaatcttgataatttagggagagttgtaataccaaaggaaataagaaaggtattaggaattaatgaaggggattcaatcgaaataactaaggttaataatgatatagttttgaggaaatacagtaaaggatgcatcttttgtggaagtgataaagatataagtgaatttaataatgtgcttgtttgtagtggctgcagaaagattttaggacagaattagaatgaacaggccgaaagatttacctaaccgcctggaatgcgcatactgcaagaggaattataaacatggtggagaatgtcagggaaaaagcacaaatagaaatgaagatggctgtctttattttagcatggatgaaaaaggatgtataagaaatatagatcaaagtataccttttaatctatatagtgatattccaccagttggtatgtggagagatggatggacaatatataatcaagatacaaaaatcagaataaataagatatatgctttaagctggaatgaaagaaaaggtttgttgtatgttaaatgtaactttgattattttattaatgagtttagtgagaattataaaaaagaaactaataaaccaaatctaaaggttattaaatgagtcacatgaagaaatgaatattttgaattattgattaaggattaaaaggataaaattttaaaaaaggggataatcaaaatgggaggtttactaattttcaagaatgaaagatttggagaaataagatgggtaaaaattaataataaagattatgctgttgggattgatatagcaaaagctttaggatataaaaagcctaatgatgcaatttcaagacactgtagagggtccgtgaaacacggagtaggggtagtaacggggaaaagaaaagatggaactgatgctatccaaaatgtagaaatgagtgtaattcctgaaggagatatatatcgcttagtcgctaaatctgaattaccaggtgcagagaaatttgaagcctggatttttgatgaggtgttaccttgcataaggaaaacagggatgtatgctacagatgaattattagataatccagatttacttattgctgcagctactaagttaaaagaagagagaaaagcaaggttggaagccgaaaataaagtaaaattactagaacctaaaggggaattttatgatgatgttgcaggctctaaagattctattgaaatgggccatgttgcaaaggttcttggcattaaaagaatgggaagaaatagactattttcattattaagagaaaagaaagtcttggataaaaataatattccttatcagcagtttgtagacatgaggtattttcgagtattagagcaaaaatatacagtaccaaatggagagactaaaatcaatataaaaacaatggtatttcaaaaaggaatagaatttataaggaaaaagattaatgagccatgagtcaagttacttaatgaagaaagtacaaaaaatagaagcttatcatataaagacaagcttctataatgttactcaaaactaagctacatcaaatttagtaacttgtcgttgagtaacttgagcaccagatttcttaactaaatcaccagaattagttttgaaaacattcttagcaattacagtatccataagtgcgttaacctcatcttttgtaagagtaggtttaacaccagaaacacttaaagtacttttttcaccagctacagttaaaaaagtcatagataaagaatattccatttaatttccccccaatcttaagtagagaactcgaatctatgattcggtgtgaatcacttactcagcgaacgaatgtgagtcgagtttcctacaatattttttttagaataagatcctaagcatttgctaagctagaagattcattaataaaataatctctagtattagcttccataacacctttaattgcatctgcgacagcatagacattctcaggtgtagcatctgtttttatacctgagaaagttttcttggtataaattgggtccccagctttatctaaagctttttgaacctcgatactaagagaaactgagtcgatagttttagttacagccatagttttaacctccttcattttgttttcataaatgatatatggataaatgcttaacattacataaatagataaaatttatttgttttttatgaacaaaagaactaaaacagattaaagatattgaaaggatgaatatgaaaagtgaatgtttcatcgaaggacaaattagtatatttgatttacctgctatagaagttataaaacccaagaaaattattattaaagaagaaactaaagaagtggataagttttatgcaatcactagattatattcacaaagttgtagcagaatagttaagacactgagtggcgcagtgttagttgaattagacgataaaactttgtattttaatgcaagtggcataaatgagtttagtctacctaaagatgtgggaatcatgcctggagaagaaatacttattgcgaatagtgataagaaaataaatgaaacacaaaaacaaaagttagaggctcttaagcctaaacaatatatcaaaagaaaaggtgatgctaatttaataatacctggagaaaaaactatagtgataaatccaaaaggatggatattagaatataatcaaaagccaagttatcattcaaatgaactaattaatacggaatttaatcttgaaattaatgaggtggatgataaaaagaataaaatagatcttgaaacgaatgatatagaatttaagattgacgatgaggttaatattgaatatcaaggcataaagaccgttgggaaggttgttagggtatataataatggagaaaccgtgaatgtgaaatgggatggaaaacaaacagctttttattataagaatgtaagtaagataaataatcctaaataaatgatttcagttgattaagcttgtataaattaggcaattattaagatagaaagaatttaggaggatctttatggttgatataataaattatttatataatatggttctatttctattatggggatgtttatttatttcagtagcagtagttggttacataatagggataataaaatatgctaaaaaatttatagttcttaatcaataattagagaaaataaaaattaataatatggtcaataaagaaaatatttaggtgatttatagtgtagcaacataaacaaatgttgctatatttatttttctctagatgtagataattattcctagatgaaaagtatggattatatagtataataagttattctcataatgtttaattgtagaagaatgtataggtcagatgacaaatttaaaacagaagttaaaataataacttcctagaatcttaattagtagttacgctaaagatgataggagaagctaatggctcagttatagaagcaagggggagaaatccggaagtgacattaaacgagattatagaatccaaacttaaaatcaagagatataaatatgaatcaagatctatggaagcaatactcgaaatgagtatgctgactaatgcgaaaaaagtgggagcaatcatatcttccatctaagaaacaattaaaattgcatgtagatgaagaacaatttttacgctaatgacaaaaaaataagatatatataatcgttaaggtttggccagaaatattagctaaatcaaattttgaaatagaacgattgaaatttatgtgttattgcgaaactaagctttaactttgatgaaaaagatatttgattcagaatactagaaatcaagtatcttttttattttttcacgtatagaaataaaaagaaatttattaattttagaatagtaacgtgtgttacagaaatgatgaaaagaatatagtaaactttaaattgccgaagttaagaaataataaaaaggaattatttaattttatacaaaaataaaaggtaaaataggaggacataatatgtcaatgttttgttatcaatgtcaagaaacagctggatgtaagggctgtactaaagtaggtgtatgcggtaaggatgagtatgtagcaaaggctcaagacttattaatatatgtaactaaaggactagctatagtaagtaatgaaggaagaaaagttggagttaaggatagtaaagttgataaatatataacagaaaacttatttacaacaattacaaacgctaattttgatagagattctattttagatagagttaaagaaactttaaaattaagagaagaattaaaagctaaagtaattagctctggtggtaaagttggagaagtaaaagtaactggtggtttcttcaagaaaatattcggaatgcaaactacagaaatgattatgccagaagcagctacttggacagctgacaatacaatagaatttgatgaaaaagcagaaaaggttggagttcttgcaactgaaaatgaagatataagaagtttaagagaacttatcacttatggattaaaaggattatctgcttacatgaagcatgctatgaacttaaaatataataatgaagaagttcatgcatttatggcaaaagcattagctgctacaatagatgatacattaacagttgatgattatgttggacttgcattagaagcaggtaaatttggtgtagatggtatggcattacttgataaagctaatactgaaagctacggacatccagaaataacaacagtagatattggagttagaactaatccaggaatattaatttcaggacatgacttaagagacttagaaatgttacttgagcaaacagaaggtactggagtagatgtttatactcacggagaaatgcttgctgggcaatactatccaaaatttaaaaaatatagtcattttgcaggaaactatggtaatgcatggtggaaacaaaaagaagaatttgaaaaattcaatggaccaatccttatgactacaaactgtatagttataccaaaggattcttataagaaaagattatttacaacaggtgctacaggaatgccaggatgtcctcatattgaacctaaagctgatggaacaaaggacttctcaaaagttatagcaatggctaaaaaatgtaaagcacctactgaaatagaaaaaggacaaatagttggaggttttgctcataaccaagttttagctttagcagataaggttgtagatgcagttaaatctggtgctataaagagattctttgtaatggcaggatgcgatggtagagctaaatcaagagattactatgcagaattcgcacaaaagttaccaatggatacagttatattaacagcaggttgcgctaaatataaatataacaaattaaacttaggtgatattggaggaattccaagagtattagatgcaggacaatgtaatgattcatattcattagttgttatagcacttaaacttcaagaagtatttggattaaagagtgtaaatgaattacctatatcatacaacatagcttggtatgaacaaaaagctgtaatagtattattatcattattacacttaggagttaaaaacattcacttaggaccaacacttccagcattcctttcaccaaatgttgctaaagtattagtagataactttggtattggtggaatcactaatgtagaagacgatatgaagatgtttatggaagcttaaaataagtagttctcattaaaaatgatcagcgaatgagcacaataaaaatgcaccctatttataatctacaatatagaatcctagctgcgaaattgtagctaggatttatttttaggctttagtatcaacgcttagtaaattaaaacaaggaggatgatggaatgaataataattgcggtaactgttgtaataattgtagaggaaatctttgtgcaagcaaggttccaatgtttgaaaacttaaatgatgaagaattattagatattgtaaatatgataaatcataaagaatatattaaaggcgatataatttttagtgaaggtaatatagcaaatacactttatttcgtgaatgaaggaaaaataaaattatataggtatactaaagatggtaaagaacagatattacatatactttcagaaggagacttttttggagaattagatctaataaagccttctacgtatagatttaacgctaaagcaatagtagatgctaaggtatgcacacttactaaggatgagctgaaggatgcaatgatgagaaagcctgagattggaataaaattattagaaactgtgagagaaagattgtcaaaggttgaagatcttgtacagaatctagcaaccaaggatgtggattctagaatggcttatttaataacagatttaatgaccagttatggagaaaacattgaagatagtatatctattaaattaccaatctcaagaggagatatggcgaattatattggagtaactccggaaactataagtagaaaacttaaaaaatttgaagatgaaaaaataataaagatagtaggaactaagaacattataattttagatgaaaagaaattaaaggattatatataaaaataaatttttattgatatttgatttcaatcatattttattaaaagaaatgaggttataatgaagtcagaaattaagtaaaataaattttataaataaataacagaatttaggaggaattaaatatgtcaaattttgctgcaactgtggatgctagaaaatatgaaccaagagataagcatcctgttatttttaaaacttttgaaagtttaggatctggtgaaaaaatggagcttataaatgatcatgatccacgtccactacattatcaatttataatggaacttccagaacaatttgaatgggaatacctcgaagaaggtcctgaggtatggcgagttgcaattacaaagaaataaatattttaaagaagatgtttcagatattaatctaaggcatctttttgcgtaacagtaaggcgtattttactaaaaaagtaccttataagattagctaaatcccataaggaaaaaataactatatcctttgttatttttttgttttacttaaaaagttatattttatcagattatcatacaaagtttgcatacggtgaattaaagtaaactaaagtgcaaatgatatatacgcacacaaagtcataaaaagataggaggtttattatggatagttatgtttgtacagtatgtggttatatttatgatccagcggtaggggattctgataatggtgttaatcctggaacaaaatttgaagatattcctgatgattgggtatgccctttatgtggagtaccaaaatcggattttgaaaaagtagaataatatgattatagggcataaattagttttgaactaaaatagtagagaagcaatgagcttgcaagggatcgctataaaactaacagagtttgttttatagcggctctttatttcaacaataaaataatgtgaatttcgaagagctcacattgaatgtataattaaattatgcgactaactaaatcatcattaaaaattataatgagtttaataatgattttcaacgtttgaccaataaggaataataatttaatttatacaaataataatatagattaattttaaggagtgatttctatggatgaaaatcctatgttttgctatcagtgtgagcaaacagcagggggaaaaggatgcaccaaaatgggtgtgtgcggaaaaacacctgaaatagctaatcttcaagatttacttttataccaatgcaaaggtataagttgttatgtcatggatcttatagaaaaaggcgaggaaatagataaaagtatagttagttttgtagaaaattcgttattcactacacttacaaatgttaattttgatgcagaagttcatgtagaaatgcttaaggaatctcaaaaaataaaagagagtttaagagataaagtgagttctgataaagaatatccagaacaagcaacttataacttaagtgaaactaaggaagaaatgcttaaagatgcaaaaagagctggaattatgtttgaccaagatttagatgctgatgtaagatcacttagacaaacaatagtttatggcttaaagggaataagtgcatatgggcatcaagcaaggtgtttaggttattatgatgatcaagttgataatttctattttagaggattagaatgtacaacaaatgataatttaagcgttgaagagttaattagaatgactatgagaaccggtgatatgagtgttgctgttatgagtaaattagatgaagctaatacagggacttataagaatccaagtcctcataaagttaatgtaaatattaaaaagggaccatttatcattgtttcagggcatgatttaagagacttagatatgttattagaacaaactgaaggcaaaggaattaacatatatactcatggtgaaatgatacctagtcatggttatcctgaacttaaaaaatatgaacaccttgtaggaaattatgggggtgcttggcaagatcaacaaaaagaatttgatggtataccaggctgtattttaatgactacaaattgcttgatgagacctagggaaacatataaagatagaatttttacaacaagtgtagttggatgggatggagttaaatatattcctgccgacaaagatggtcataaagactttacaccaataatagaaaaagcattagaacttggtgggtttacaaaaacagaagaaccaaaagaaattcttgttgggtttggtcaccacgctacattaagtcatgcagaaacaattgttaatgcagttaaggacggaagcattagacatttcttcttaattggagggtgtgatggcgctaggccaggaagaaattactatactgaatttgcaaagaaggttccagaagattgtgttatcctaaccttagcatgcgggaaatatagatttaataaattagattttggagaagttgctggacttccaagattattagatgttggccaatgcaatgatgcttattcagcagttagaattgcaacagcacttgcagatgcatttgataccagtgtaaatggattaccattatcaatagttctttcgtggtatgaacaaaaagcggttgctgatcttttagcattactttcattaggtataaaaggaatgttccttgggccatcacttccagcgtttataagtcctaatgtattgcaatatttagttgatacatttaacttacaaacaataagtgagcctgacgaagatttaaaaacttgcttaaaacaaagtgtataaatgtaaataataataatttaaatagaaactatctcaattttagagatagtttttttgttatatataattataaatttagtaatgcagtataaattgagtcagtgtttatttcattttaattttagaatttgaatttttttaaaacttgattgaaatcatattgtttttatttttgcaaagatataataggctcatgagctaaatgaaacaagcttaagaaaaacaagcattaaaataaagaactgaagaaaaatgaggaggatttcaatgatagattctaataagataaattcaaataacaaatggaagggatttaaagacttccttgtatataaaacagttaaagaagatgaggtagttacatcattctatttaaaatcattagatggaagtaagcttcctgaatttatagcagggcaatttataactgtcagaataaaaaatgaagataatacttttactaaacctagacaatatacattgtccatgaattctaatgaagaattttatagaataagtgtaaagagagaagagaatggttacttaagcaaaaaactatgtgatgaaataaaggcaggagataatcttcaaataactgcacctcttggaaatttcatattaaaggatagtgaaaagccactagttttaataggagggggaattggaataacaccgatgcttacaatggcttatgatgcagtaaacagtgatagaaaaattcacttcatttatagcatacctaattcaactcatcatagttttaaagaagaaacagtaaaattacataataataatttcaaaagtaatgtattttatacacgtcctaaagaaaatgaaaaattaggaaaagattttgatgtacaaggcaggatatcagagaaatggatgatagataacttgccaaaggatggagacttctatttttgtggaccagtgccatttatgaaaactgtttatcataatttaatatcaatggccattgaaaaggaaaatataaactttgaaatgtttgaagcaggagtagatataacaaaagagtaacaaagtataaacaaatgaggaggaaattgattatgtttaatcatataaaaaataaaaacaatacttttaaaaatttaataaatggggaatgggttagcagcagaagtgaaaactttgtagagataaaatcaccacttgataattcattgttaggtagagtaccggctatgacaaaggaagaggtagatactgcagtagtaacagctaaagaagctcaaagaaagtggaataacacaactataaatgcaagagcagaaatattatataaagcatcagacattttactggaaaatatagatgaattatcagaacttatgatgatggaaattgcaaaagatagaaaaagctgcagatcagaagtatccagaacagcagattttataaggtttacagcagatacagctaagaatttatctggtgaaagtattccaggagatagcttcccaggttttaagaataataagatgtcagttgtaaaaagggaaccattaggagttgtacttgcaatatctccttttaattatccaataaatttatcagcttctaaaatagcacctggtttaatggcgggaaattccattgtattaaaaccagcaactcaagggagcttatgtggattatatctagcaagaatattcgaaaaagcaggggttccagccggagtactaaatacagttacaggtaaaggaagtgaaattggagattatattactactcataaagggataaatttcatcaactttacaggtagtacagaagtaggaactagaatttctaagatgactagtatggtacctcttttaatggaattaggtggcaaggatgcagctatagttttagaagatgctgatcttgaactaactgcaagtaatatagttgcaggtggatattcatattcaggtcaaagatgcacagcggtaaagagaattttagtagtagatgaagtagcagatgaattattagaaaaaatcaaagaaaagatggaaaagcttactgtagggaatcctttagagaaagatgtagatgttgtacctcttattagttctaaagctgcagattttgttattgaattaatagaagatgcaaagggtaaaggagctgacttaattgtaggaggaaacagagatggaaatttaatttatccaacactttttgataatgttactttagacatgagaattgcatgggaagaaccatttggccctgtacttccaattattagggttaaagataaagatgaagctatagaaatagctaatgaatcagaatatgggcttcaaagtgctgtatttacaaagaacatagataatgctttttatgtggctgataagttagaagtaggaacagttcaagtaaataataaaacagaaagaggtcctgataatttcccattccttggtgtgaaagcttctggtataggaactcaggggataaaatattcaattgaatctatgtctagacctaaggctactataataaatctatcaatacataattaagagtggcagaaaaatgaaatattctattgagatttgatttcaatcacattttttaaaaacaaataaagttataataatgtcagaagttaaataaaaaaacaatttaagaagtagatagcataatttgggaggtattaatatgaaaataatatattttagtcaaacaggaaatacagaaaaaatggcaaacttaattctagaaggaatagaatcagaggggaagaaagccgaattagttgaagtatcaaatgcaacacttgatgatgttaataatgaagaaatacttattttaggatgctcagcttatggatcagaagaattagatgaaagtgaaatggaaccttttgttaaatcattagaaggaagtttgcaaggaaagaaagttgctctttttggttcatggggatggggcaatggtgaatggatgacagaatgggaaaagagaatggagtcatatggtgctatattaataaacgaaggtttaaccgtgcaggaatctcctgaaggtgaagatgaagacaaatgcagagattttggaaaattaatagcaaaataggaataacaaaaaccatgcaataaggagatttatctcccttattgcatggttttcaattttatacagtggctttatgcattttgcaatagttcaaatacttgtccaactttaaaagtttagcctaatatttgttttaaatcctcatcaggagtactgattggtttaagatcgaaattatcaactaagaaatttaatacattaggagttaagaaagcaggtaagcttggcccgatatacattccttttacgcctaatgaaagtaatgctagtaaatcacatacagctttttgttcataccaagacaatactattgataaaggtaaatcattaactgtacagttaaatgcatcagctaaagctaaagctattctaactgctgagtatgcatcattacattgtccaacatcaagcaatcttggaagtcctgcaacttcaccaaattgtaatttgttgaaacgatattttccacacgctaaagtaagaataatacagtcacttggaattttttcagcaaactctgtataataatttcttccaggctttgcaccatcacatccaccaattaagaagaagtgcttaacttttccgtctttaactgcattaataattgtttcagcatgacctaaggttgccttatgcccaaagcctactaaaatttctttaacttcttcgtcttctgtgaaaccaccaagttcaagtgctttatttattatttcagagaaatccttatatccattttcatctttttcaatatgtttaataccatcaaatccaacaacacttgttgagaatattctatctatataagaatcttttggtctcattaagcagtttgttgtcattaaaatacaaccaggtatattatcaaattctttttgttgattttgccatgcacttccgaaattacccactaaatgaggatatttgtttaattcaggatatccatgtgaaggtaacatttcgccatgagtataaatatttattcctttaccctcagtttgctcaagtaacatttctagatctcttaaatcatgtccagaaactactatgaatggaccttttttaatatttacattaacttttgtaggtgatggagaactataagtagtattattagcagtatctaaaacttccataatcttaacactcatagtacctgtttccattgcaagtttaatcaaatcttcaagatttaaactatcatcagctaaagctgctaaagctttaaaatagaagtcatttacttcatcgctagtatattttataaatctagcttgatgagaataagcagcgattccttttaaaccatattttatagtttctctaagagaacgaatatctggatctaagttctcatcgtacattattccagctttttcagcatcttcaagtatagattctttagaatcacttaggttgtacaacgcttcaggagaggtgatattttcagatttaacctttgctcttaaagactctttaatttcttgagactttttaagttgaataaggtgagccttagggtcaaaattaacattagttaatgtcataaataaagaatcttcaacaaaagaggctactgatgtgtcaaccttttcatttttgtttaaaagttcttttgcgtaaacactgattccttttaattgataaatcaataaatcttgcattgctgcaatttcaggtgttttaccacacacacctattttagtacatcccttacccccagcagtttgttcacattgataacaaaacattttttctaccataataaaaactcctctcatatttacataatataatgctacggatatattatacaataaaacggaataataatacaatataattatataatattcaatattatataagaaataccacattgtgaggtgaaattttgtcaaaacattaattatgattataggatataattgacaacttgatattatttaaaagaatatgtaaatattaatttaataattatcttaatgatacacgtgatttgcaattaaataggtactacgaagtgttttaaattaccacaaataaagaagacaaaaaaacaaacaataagaaatataaactaattcatcaatgaaaaaagcaagctggattggaggaactattatgagacgtaaattaaaatatattttaatctttgcttttggtgtattgcttattggttgtaagttcggtaaaactgtaccttctcctgaaaatcaaataaataatgaacaatcagaggcaaaacctgatgaatcagatgagaaagaattaggtgaaaaatctagtaatgaaccaagtaaaaattctgatggaaataaagaagaaaagagctaggcagaatctaaagaaaacaataatgaagcatcatctgaaaaatccagccaaaatgttactgagaaatctgatgagaaagctacatctgaatcacgcgaaatagtcgaagaagataagactgttgcaacaaataagaaaaaaattatttatttaacatttgatgatggaccaagttttactgtgacaagtaatgttttagatatattaaaagagaataaagtaaaggcaacattttttttgattggaaatcagattaaaggcagggaagcggtggtaaagagaatttataatgaaggaaatagtttaggcctacatagttatacacatgactataacataatttacagtgatgaagataactttattaaagaaatgatcgattgcaggaatgcaataaacaaggttgctggaataacacctaatataattaggtttccaggcggcggtcataaacgtttaagtaataattttcttaaaaaattacatgataagaattttaaagtgtatgattagaatttggaaaatagtgatggattaaaacctaaaacatcatcatgtgaattatatgaaaaagctataaatggaagtgaaaataagaataagattatattgcttttgcattgcacaaacaatcaccaaaatacgtgtaaagctcttcctcaaataataaaatactataaatcaagaggttatgaatttagaacaataactgaagaaacaaaagagctatattttccaataaagaaataaatcgtatacaaaaagtctaaaaagatatcgtaacgtgaagatattacaaatagggtagatgaaacggagtgtaacaaatgaaaagaagaagatttattaggaacactattttattaattatatttgtttttatattaaattcattgaggtatgcagttaatgcggaatcaaaaattcattctaatagtaatatatctatattagttgatattagtgaagaaaggctttatttaatagatactgagaaaaatataatattaaaaaaatatacaatagctagtggtaaacaagaaacaccttctccggtaggtacatggaaagtggtacgtatggctaaatggagtggaggttttggcacaaggtggattggattaaatgtaccttggggaatttatggaattcatggcacaaataaaccatactctattgggagcgaagcctcccatggatgtattagaatgcgaaataaggatatagaggaattatatgagtatgtaaagcgtggaatgatagtatgcatatacgcaggcccatatggcccttttgaaaaaggatttgtaaatttaaagcctggcgatagaggggcggatgttttagaagtgcaaagaaaaatgaaagaaaaaggctattatcctaaaaatttagatggaatatatggcgaaggaatgaaactgtatgtaataaagtttaggaaagaaaataaccttaaagaatgtcatgatattaataaagagttttatgaaaaacttgggattactttggtagattaaatctttatccaattattatatcatcatcaacagcattattattcatgttgttattattgctgttattttggttaccattattgttattactaataaacagcctatgcccacaatgaagtttccaaggacgtttagctcttcagcatttttaccttttgcaagagaaataacaattgcatttgttaaaattagagaatcttcaggagttaagttttcaaaacctgtcattatttacacccacttactataacatataattaataattatgacatttgattaaataatatgagtatgggtgttaaataaatagttgtatattaataatatattattagtttattaaaaagcattatttaatgtaattataaaattatgagaggtaataaaaatgtatgtaattaaaaagttcatagaaacgattttgatatcttatactattctcttaaaatatatgttaactttatgcgaaagttctttgaaaattgaatgtgcgatgtttacaaagttcggtataacaagtatatacttgtataggttataagcataaatattattaaatttattggacataatagtaccgaaaggtggatatgcgatgaaaagatttactgttttattattggtctttttatgtttaacgcttactgtattcggaataaaacctgcatttccagttacaatcagtaatacatttaaccaaggtatttataaaatatctgattttaacccttcgaaaaacagtgtttattcagttcaaaacgtttcatcaaaggataatatgtccattattattacggatgaagaacaaaatatacttcaatctatacgactaaaacctaattcagaaaagcataacacaatacctataggtcctaatgacacaattatattacttggtaaaggtgcagtttttgttaatccattggaacttacagagtgatgtcgtttaattattaattagcaaaataaataataaattagaatatcgcactattcgtaaaactgagaatagatttgcgatatttttttatttaagatactgtttcgtaataatctagacaaagagatgaggtaatgcaatgcaaacattaagcaaaacagcagagcaatctagaaaatgtcctaatgttaaaaattgcaataataagagaattgaagcatgtgcattagctgagttacctaagcaaacatagattgcagtactactaatgaataatacaattacaccaattactggatttaaggtgttgctaatacaaataagaaaatttaaaacaagatctattaatggtttaagttttgtgttggtttatattgatactagggtttatgggaaatgattttttaaattggaggaattaaatataattaaaaaattttattataactatatcatcttcataattgatccacaattaagatgtagaataaacacataaagagaagacaattgagggagtgatatacaatgaaaaagaaagttatgattctagtattagcaatcatagtaactgtaagtggcatgtcacttgcatatgcagaaggtggcaataatatagattctaataaatttaatggacaagatagtggggttaaatcattatcagattatagaggaaatatgatgagcctgatgggggatggagttcaatcagatgatgatatgaataaaatgattgaattaatgaaagagaatggttttactgatgaagcaaatgctatgaaaaatagagattttaataccatgaaaaatttaatggctaactaagtgatgatgattatagcaagataattgatataatgcaaaataatagatatggatctatggctaatatgatgaaatctgtaggcagagaaaatatggcagaatttcataaaaatatggtgggttattaatatttaaagtttaaaagaattaaaatagttaagttcgcctggcacttttataataagtattgtatataaataaattataagcaattatttaggcaatatttatggatattttcgatttatcgccagaagaactcactgccttaacagcggttctatctataggaattgcaaaacaatatactgaaggtgaccagttaggcgtattggcactctttttcactagtataggtgatattctggcattaattcaactacagagattaagtatagctgcgagagttgagaaggtacaaaatgagcaaagtgcacaaaatacacaaaatgataaaagtactcagaatactcaaaaacctaatttgaatgaaacaaaggcttaacgttaaaacattatgtatcattaaaatgaatatatttttaatatatatgtaaatgtaataatacacaagctaatgtagaattaatagaataaattagtaagatgagtaggtagttttagtgatgagtttaaatttaattgtcaacattaaagacatagaccattatatatgttcataagtatagatacaaaagactttgtgtagattacgcgaagtcttttgtgtattatattagaggggaaatataatgatatagtaatctcaagtttaagggaatgtaatatttaatttttatatgaatttcttaagctgatgacattaggagaaaagaaggcaagtacacttcgctaaataagtcgttgtcccgaaatgctacaagcccacaaggggcttgcacacttcgggaaacgttatttagctaaatgtacatgccttctttggtgtattagggtttcttggtgcagatgatggagaaggtgttaatatggttttggtgtattataatacttgaaataatgctgcatgcgcagataaagtatttgtttaaatgtgagagcaggaataaaagttaatgtttttctttttaaagagatcctttgaatttacttataaattctaactacagaaagagtcaatgcgtaatacccagaagcgtcgcttctagtattacattgacgctttcttcagatattatttttaatgtggtaataggattaaaggctgtgccttaatcctatgcaataataaaatagtataaatataaggtgttattctaaagattatggagaggatctattggtttattacatgatttatggagaagtgatgcatatgcataaagagaagggcgccttggacttgccctcacaagtatattggaaaggttattggaaagtgagggcaggtccataatgtacatgcttgcctgatagtcattattagtaatggagttatttccgctcaagaaatccaatcaataaaaataatagaaataaaatatataatgaaattatttttagtgatacgatttcttttgcttcaataacactcattactaataatgacaggcagaaaagcatgtacattgacggcgccaattaaaattgaataattaattttaaaatatattaaaagtaagtgcattaaatggcataaattatgaatgttgactttaatttaaaagtaaggatataatttgtatagagtaaattagaaaatatttagttgaaattaatagtgtacttatttggaggtaaatatggatgatatggataataataaattaattacttatggtccaataacgagtatttggagtgttaatggcacaaagatattgaaatatcaacaagaaatttggcataatggcctaaatgaatataagattttcacaggtcaaaataaacaaattcttaataataaagttaatgtacaggttaataagtggattaaaatttggaaaataaattgtgaaaaaaagaatattgaaaatatgaaaaaggcttgtgttgatgaggctattaatagaaccaaagaagctaaagatagattagaagaagttgaaagaattctgcttagctcattagaaataaacaatgttgttgactgggagttattaaaagataaagaggaatttaagattccttatccagtgaaaccagatgaacctaagttatatcctattccgactgaacctaataaaagtgatccacaatttcagccaaagttaaatttgttttctaatataattaaatttctaagagaaaaagcaatttcagaggctgaacgtatttataacatagcccatgagaattggcagaaagcttgtaatgaagcaattgaaaagaatattaaattgactacagaatatgaggaaaatatagggaaatttaaggaaaagattgctgaatggaatgacaaaaaatcagagtatattaaagagcaagatgaaaataattctaaaatcgatgagttaaaatcaaattacttatcttcggatatctcagctattattgagtattgtgaaattgtattaagtaaatcatatcttccagagtttataaataaagaatttgagattaattataattctaataataaaatattgataatagattatttactgcccaatattgaggattttcccaatattaaagaagtaaaatacatagcctcaagaaatgaattaaaagaagccttttataatgaagcttttatggaaaagctatttgattctaccatatataaacttgttttgagagttatacatgaagaatttgaagcagacataataaatgccatagatgcaatttcatttaatggttggataaattatttaaataaagcaaccggaaatagagaagatgcttgcattgtaagtattcaagtaaaaagggaagtttttagtgagatagatttaaaaaatgtagaccctaaagcttgttttaaaagtttgaaaggtgttggtagctcgaagttagcaggtattactccggttcagcctattttaactatggataaaaatgataaaaggtttattgattcttataatgtcgccgatacacttgatgattcggttaacttggctgcaatcccttgggaagattttgaacaactaattacagaattgtttcaagctgaattttcagtaagtggcggagaagtaaaagttactcaagcaagtagagatggtggcgtagatgccattgcgtttgatccagatcctatcagaggtgggaaaatagtaatacaggccaagagatatacaaatacagttggcgtatctgcagtacgagatttatatggaactgtaatgaatgaaggtgcaactaaagggattcttgtaacaactgctgattacggacctgatgcttatgagtttgctaaaaacaaacctattacacttcttaacgggggaaatatattacacatgcttgaaaaacatgggcataaggctaagatagacttaaaagaagcaaaggcattaaatttagcaaatagcctatctaagcgtaaataattaataaaagttttttagttaataagatgtttgcataaaataatgttttttaggaaagcaattataccaatataaaataaatagagtcaaggggattgcgagcactcacccctttacaccgtttattttatatggagcttaagtagttgcctcaaaaacatcagaggcttgtcccaaaattctgtgattagtccggtagggtttcaagaatctaggttttacctttgcacagacttttattaaatttttcatatatttaattattatattttgtgggtattattagtttaaattatagaaataagcctggagagatcctctccaggcttattttatttcaagttctagttgcattggtcttgtatcaaggtaatgttcatattctattttatagtatatgattaattttcttctgccttcatatggtaggttatttacaagtgaatcaaattgggcttttgatacaaagcctttttcttttataagccatgttgcaaatgtcattagatctaatcctttcatatagagatttttaatgagggatagagatgcgtatttctctaatcccattcagtctgtaggtaatttataaagtattgatatttttcgtgataatataaatcagttcttttagattcttcttttgataatatagaaaaccattctttatagtgtccgtaggaattaaaagcttctttagtagtaagccattttgtaaatgtgaagtttctcatattttttcaaatcctctcttaaccttatattataattattgccaaatatgcgaacaaatattcgtagatgcttgtacttgtttgtatattttttagctattttaagtataagaaatttaattgttggctagaatattttaaagataaggagtggaataataatggaaaatagaaatagaataaaaaaagaaaaaccaccaacaaagcaacttcatgtggaatgtgagattaagttatatgaagactttgaagcatattgtcataggaatggaaaagatgttagtaaggcgataagaggatatatgaaactatgtattggagaataaattataaataatcaaagtacctaaaaaggtgctttttttgtacataaataatgtctaaaatttctgtaagtgggaataataaaaatatgggagtagagggagtaaaaagaaaaggtggccataaaagtggaaaagagaaaatatgaatcaaaaacattaatagcagagtacagatatttaagcgaaaataaagaattcagattttctgaaacagcgtatagactaaagaatggatcaataattattgagtatgaaggcgcaccattaagtctttatggattgaaattaagttataacaagaatatagcaagaaaaggaatattcagtgttacaagtgatgattatgaattttggaagtcatttagaggcaaaattgagggtaacagttttgtagattatgaagctgaaagaaatgaagatatagaaaaagccagggaagaatattataaacaagtaaatgcagaacatgaaaatatattagaaagtttatcatgcgaggagctgtcatactaaatacataaggggagaaatcccctatatataaagagataataaggacaagcacttagcactaggaacctatgattaaagaaaataatataagctatattcttaaaggttcaaccgataaattaaaaacagcatgtccaatcaagcggtataatatcacatagatttttcatattaactttacctatttatttaaaaggcaggtcaagaccaaaagcgaagcgtgtcttgagctacattttaaataaatgtaccatgttatatgaaaaaactatataaaatgtataatctagagtttatcaatgggggcggtcttggactggcttttttaatacctctacataattaaaagtagataatagatctgaaaatcgtatcattaaaaataatttccctatgatataatttattatttttagtgattggatttttagagcggaaaaaccatataattaaacattatagtaatgaacttaagcctgtacaagataggcattccgtcacattactaatactttcttatataattgtgatggcatgtctaagcccccaaaattcttgtcagcttgtctggccaactaaacattatctttacattttcctataccagaaaaaataaattataatgaacttaaaaaagaaccataaacaaaagttccagtcagagggatggataaatattctatacacattttaaagaaagaatttaattgtatagttacttaattataatttattcatgaaaatctccatcccgaagtgccccaccgggaacccaaataaaggactagtctaatgcgtatagattcttactttgtaaaagactccgagtgatgaggagacttttacaatgttagaagtctgtagctgtatgacctgtccatttttgggtggtggatatggcacccaaagaactctaaagcagataaacttgtcctttagaaaatgcgtatatagctataccgataatagccataacataaagaccatagataaaatataattaattagaaactagttagtggtatataaagataatttaaattaagcacgtagaaataaaactaaactaatagagtggcgcagccacaaggagaacgtagtgctccaatatatttattccttgctgccgcaggctacaacaattaatgagaagtagagattataaatgtttagactatacccccataatatataggtactaaaaacagtagaatctataaactagcttgaacttctcttccttaggagcgaagcgacgttgttggattacaaaagatggactgaatgaagctatacctagatttgaaaatacattatggttataatagctttattctgtccatcttaactccttatattattttaatttgttacataataatattgatgcaataatatgaaaacttgtaaataaattcagttgtaatatactaataattatataaagtgatattaaatagttaaaaactctaggcttataaaaaattatattaaaagtaaacaatttatgtggttaggagaaagcttatgcaaattaattatatgactctaattatgaattggatcaattttgggttaataattttaataataataggaatatataaaggggtaaacgcatttaaaagttttataaaaaagaataaacaaataaatgaaaaattggacatcattttagagacactcgaagaaaacaagaaatgaatttaaggtggcttttttaaaatatttcttgataataaattattgtgcaatatagataataaaattttaatggagagtgatatcctaatgaaatttatagatatagaaaactggaagagaaaagatcactataattattttaagaaagttgattacccgcattttaatatttgtggaaaccttgatattacaaagttttatagatatattaaagaaaatgattttccgttttttgtatcaatgttatatgtttccacaaaagcagcaaacaatgtaaaagaatttagatttagaataagagaagataaggtgattgaacataaaactgtaagcccttcttttactgtgatgacagagggggaaatatttagtttctgcacatctaattttatagagggatttaaggaattcaaaaataatacattaaaggaaattgagaaggtaaaaaacaacgttattatagaagatgaaccaaggcgtgacgacctattatacattaccagcattccatgggtttcatttactaatataactcacccaattcagatgaatcctgttgatagcataccaagaatatcatgggggaaatactttgaagagaatggtaggattaagttgccaatctctgtacaggtacatcatgccgtggttgatggaatacatattggacaatattttaatatcattcaagaaattttagataatcctttgaattacctgtaaaatttatttctagtagaaatttttatattatgtcgaagaataatattcttaaattgtgtcataacagtaaatttattgttcattaatagagtgggaattttgataaaggagggggagcagcaagtgaaagaactaaagaagtatattatatttgtaataatagtgttggcgcttgcaggaagttatttattttgccattcaacacctgaaaattcaataagaacacacttgttttttaacggatatttagtaaaggcgttaaaaacagatatatatatgagtaatgaaacactatggaaaggtaaatattactgtgaaaatccaggaattggacctgattttatagctgtagagaaaagtgatttaggattatggtatgttgatctaaaaaatagtggaggtagctaatgttataaagagcaaatgtatattttgtcttaaatcataaattattaaaatcaaataataaattgtaaaattgcattattcaagatgattgaatttgcgactttttagtgcacaaatcaaataaaatgcaaaataagaataaactataaatattataaaaggaggctataatggaaattaattcaattaagactatcgtttctacaaacttcaatcaaactgaagatgttataagaaaagatatagaaaatttgcttgaaaaatataaaattgaactgaaatctttgagtaagatgataggagtagattatgtttggttgaaagattatatggatggaaaaaataaattatatgatttttttaccaatatcgtaaattctggtgagaataatgaagagagtttgaaaaattccaatattccgaacccttcgcatttatgcaacatgattttcatgctatctgaagggatagggatggtaaatgaagatgatcgagttaaaggggtaatagatgtgctaatagctgagtttggaattagctatgaaacattagctatatattcaggacttgagctacgagatttgcaaagttttatgaatgatactaattctgtttcctgcgagaaaaaatataagttagcagtagcaagtctatttttgcattatttatgtaaaaagccatcaaactaattcattacattcttataaaatataatagtaaattattgtgaaagagagtattaaattttcaaagatgagtttatatcaaagtaattaactttttacatagtattcttaacttgcgtatgcttttataatataaattcatattgaactatttcgttttgctctcataatatgagcaagatttaaaggcgataaacactaataatcaatgtttatcgcctttttactcatgccactttatgagaatcatcagtagaattatctgtatcgatagcaacaccaagtttagctgatattatggtatttaacttattaattgaacttgctaagctaacaatttgcttctctaagcgtattagcaaatatgcagacactgccactggaaaaccattattaacaataaggttaattaattcatttacttccataaatctatcacctcctataatggatatatgaaataaaatatattagttcatatttaggaaataaataattatgtgaaattaaaatagataaattaaattattgagtgccgccttcgtttgcaatgtgattatgataataatttatagcaatatcaactatggtactgacacatacatttatatcaggatgtatgctctttaattcatttatttttcttatggtagagcttctaagggtgtagcttcttttaatatttggagtttcaccatcaatggcaggagtagcaccattaggcagtggagttcttctattatcaaacagttctttagtagagcttaaagtattttttatttctaaggagttggttatattattttcaaaattgctgttaatagtagaagcagtattagcttgagtattggttttaggatcttcttgaataacagtattattagatttactatcagagctattttgaataatattaatattagagtcatcatcaaaagagaatgaagaaatgcagtcaccagctataggagtttcgctagtaaatccatatacttcaccttcatcatattcaaaatcatttttaggaacctttgatgtttttcttctagccataaattatataccctccttagcagtatttttatgtatccttataaaagatatatggttatttattagaaattctaaaattctaaagaatttaggaatatatattttttagaatttaagaataagagaatttaagaatattagaatttgcttgtaaaatgccggttaggagattagatatgcaagtttaatcatgattttaatgttatgttacagtataaaacatatatcaataatagcagctactaaattttaaagctgtaaataaattattggagtgtgttttaaaaatgattagagatgaaattaaacttaattcggaagaaggagaggtttttgataaaaagcaaatagctttagcaattagaaattctacctttaatgatgaacttcaatgttctttaattacggaaggaatacttaataaatgtgaaggatgttctctaaaatatatttgtgatggaatagatcaagttgttgataattatgtggagaaaactacagaggttgtgaataatttcaattttgaataagcaataaaagaaattaaaaatcttagagatattcaattttgagtgttctaagatttttttaaaattattattttaaagtatatttttatattgaatagaaaaatatgtaattatataattaaaattagcaaataaattgaaagggggaaaatatatgtcttttttagatatattcaaatcagaatcctcaaaagcagaaattgaaaacttaagaacacaatatctaaaggctaaggaaattattatagataaagaaaataaaataattgaattaaaaagattgattgaattgaaagaagaaaaatataaagaagcatatgaaaaaagtattaatttaaatctagaaatcgaacaaggcaaagaaaatattacaaaagctcaaattgaaatagctactttaaagaaatacattgaaattgataaagaaaaatatcgagaagtttatgaagaaaatgttaagttaaagctagaaaatactaaggggaatgaaattaatataagtctagaagatgatatagttagattaaagagttatattgaacaggaaaaagaaaaaaaattagaaatcttaaaagaaaattctaacttgaagttagaaagtgaaaaaagagaaaaaattattgaaagtaatgaaattcaaattattaatttacaaaaatatattgaagatgaaaaagaaaagttcatggaactttgcaaagatactgatacattaaaattacaaaacaaaaaatatgaggaaattatagtacaaaatgaaaataatgaatttaagtataaggaacaaattagtgttcaagaaaatataaataaagaatgcagattacaagataaaaaattaagtgaaaagatttcagaatatgaaaatatattaagtgatgcagattatcataaggttaaagatattaaaaattacataattaaacttgaaaatgataaatgtaatgtggaaaaagttattaattctaaacaaagtgatttgaagagcttaaatcaaaatattgaggagttagaaaagaaagttattgtgcttgatgatgaaatattatatcagagttttggattgtatactccaatgtatgatttcgcaaattcggaagaatacaaagatgagttgaccaaaattcgtgacatacaaaaagaaatattaaaagataataaagcagcttcaaatgttttatactggggtattgatattaatgctgataaggatccaaagttggttagggataatgtaaaacaaatgataagatgttttaacagtgaatgtgatgccattataaataaagttaaatttaataatatggagagtattagaaatagaatagaaaaatcatatgattcattaaataaaattaataagagaaatggaatagagatatcagatgaatatttaaatcttaagtatgaggaattaaaattagcacacgaatataatttaaaaatacaagaggaaaaggaagaaagaagaaggttattagaagataaaagagaagaggtcaagctattaaaggaaattgaagaaaagaaaagagatcttgaaaaagaaaagatgcattatgacaatgtaatgaggaatatccaagagcaaattaagaatgaacaaagcgaagaacggctaaaggttttattaaataagaaaaatgatcttgaaaataatttatgtgatgtagataaagcattaaaagaggttgattatagagaagctaattacaaagcaggatatgtttatattatatctaacattggagcatttgggaaaaatgtatataagataggaatgacacgaagacttgagccacaagatagaattgatgaattaggaaatgcatctgtaccttttaaatttgatgtacatgctatgattttttcagatgatgcacctaaattagaaagtgcaattcatagggcatttgagagtaaaaaaataaatgttgttaatggaagaaaagagttttttaaagttacattagaagaagttgaaaaagtagtgaaagccaattatgataaatcagttgattttgtaaagattccagaagcacaacaatatagagaatcgttaaagataaagggtatttagataaatttttatattatatatacaattaaatattgtatgctatttaagtatattaaattaaagtataaaagggagaatgattaatggaaatacatgttattgataatgctattaattctttagaagtcgggttagaattttataataagtttttggacaacctagacaacttggacatatcagtaagtcattttggaaatttaaagtttgctgttatatcgtttcacaatgctgttgaacttttaacaaaaggtgttttattagatgttaatgagttcttagtcttcaaggctgatattgaaaatgatgatagcttatgtgaaatgctccaaaaacaatttttaaagaaaaagagaaaagctaatatagcatatcatgctgtattttcacaaaatcattacaaaactatagaatacggaaaatcaataatattactacataaaatatttaaaaatgaaataagcaaaagagattatgaagttttagaccttttagctgaatacagaaattcgttaacacatttaggatatgcatctacatatgaatggtacaaaatattagtagtattaaataaatcattagaattaattaaaggattctatataaatagcataattagatctgaagaatattttactgatgaaattattcaaaatatagaaaagactttaaaaaaaagtaaagaatctatcccagatatatggatggcaagtcatgaatatatcttagaggatattaataataaattagatttatattttgagaataatttagtcaacattaacgatattgtacagaatagagaatatgacttttatgaaaaaattaaattttcttttaaaaataaagataataccataaatttagtttgggattttatttattcatatttaaatgaatcaatcataattgtagatgatagcaaaagaattatagggtatataagcctagaagattggaatttaacatttctatatgatgagaatggaataccaaattatttggataaagtaggcatctttataccaaaggaaaagctgtattttgatgagaatagaatatatgatataagcaataagagtaaaaataatttgttatatataaaatcaggagaatgtattattttaataaataagtatttaaaaaatagagttaaataaagattatatattattatcctttttgtaaaattaaattcaaataatattaaggtctatctatcgtaaattattaagcttttatgatagatggacctttatattatagagaaatattattaaggattttcattaaaatatttttctttttttgaatagcagtagagtagcacatatttttaaaataagcatattcctttacagtgtaatttttgtagaatacaaaatctataagttcaagttcctcttcacttaaattcttaagggctaattttaaatcatcatagtcacacatttcacataatgaagtttcagttgaaatttcaagttctggaaaatcattttcaacatcatcatgtaagcttaatgcatcactaccctcagtagatcttctggttttagttctttttattagatcattcatattatttttaatagcattagtagcataggcaacaaatctatgcttttttaaattgtacattgaaacagatttaaaaagtgaatggtagcattcctgaataatatcatgggcattatacctatcaatgaaagttcttttagagatattataaattaaaggcttaaactcataagctaatttttcttttgcttcttcatcattgttcttacatctcgtaactaaagtttcaacataatcaaaatccatataaacctccatcttcaatataagagttatgaattaaagtaattattttacatatattgtgttttgtatttaatttacctctatatatagtatatatggctagattacatataacttatataggagtataaaaataattagatttatcttgtcacttagttttttaatattgaagttcttggttacagcatatagctgctcttttaaaggcgtataactcatattaaaaagtaaataaattagaaattatggaggagatgtgtaaaatgattaattttataatagctgtaggtcatactgcgagtggtaatattggatgtggggttattgacaggcttgatgagagcaattgtactagggctataggcgccttagttgcagagtatttgcagcagaaaggttacggagtcaatttgcttagaattgataagagtaatagctataactgtgaagattgttatgaaagagcaaatcaagctaatgaaatagcaaatacaaaagatataaaactttatgttgaaattcatattaatgcaggaggaggcagtggccctgaagtattagtatttggaaagtcagaagtggctaatcaatatgcttctaaagtatgcaatgaattatcaagtactctgaatttacctaatagaggattaaaaacaagaaacttaattgttcttaacgaaactattatgcccgcaattttggttgaatgtttatttgctgatagtgatgatgcagataaatataatccagagattattgctagagctatagttaatggattggttggagcagatggttctagtaatgtagaatggaaacttgggtggaattgtaatgatgttggttggtggtattgcacggatatagataataaatactattatacttctcaaaatggctggcagaagattgatggggagtggtatatatttgatgataatggatatgcaattcatgatacttggctttttgataaaggtaataatatgtggtactacttagattcagattgtaaaagggaaatggcaagtaaggataaacctttgtaaaagtagaatgatggaaagtgttatgattttggagaggatggaaagatgtattgtaattgcattgcacctgatggatatagagttgattggagtggggtttggtttggatgttagttgaaattagaagtaatgagttaatatttgattaataaaatacaaactataaaagcagctatgcatattattgtgatttagtaatatgtatagctttttttatatgtagaagtgctttgacaattgctaaaatattacatatgtagtaatattatattaagtcgataaatcgtgaaatataggagtatacttaatataaaaaagtataatggaggataaaatgaggaaagttagtgtattaaatgggccttttttaaaaaaaataaataattttttacctaacaatacaatagaacattataattatttaaagacatatcagtttcccttggttgatattttgatgcaattatatattgatgctgatttaaatgatgattttcattcgattaatagtttcaaaaagattttaaaagaatataaaaagaaaaatccttcttttaattacagtaaagaaaatattattgaagaaggttgggttgctacatttttagatagatgggaattaaatagaagtagatataaatttgagtgtttggaatttgataaaacagataattatgatatagtactatttttaagttggatttcagatcagaaaaaacaaagaaggttatgtgtagttcttaaaaatttaaatgaaacacttgaaaagtggagggcattgtaccctgggactcctaatgttgagtggtttatagaaaataggtttatatttagtaatgaaggagtacattatgcatattcagatagtattggaaatgtagatgtatgccaagcgttagctaaaatgtggatttatcatgtaaattatgaagataaaaatgatgttgagcgatggtttgaaatagcaaggcaattaaaagcgacatctcaagtactaaaatactttgaatataaagacaagcaattatttttagaaaagttaattgaattgtatattgaagaaaaatatataattaacaataaaagagaagaaaagagaattgaaaagcagtattggctggaaaatcccaattatttaaaagaaaaaagagagattaagttattttcctctgattttcttatagagaaattagagtactatgataggcgtatttttgatctagaagtattattacatataagaagaggggatattaattttattattgattgcatggtagagtatttggatatgttgtcagatgaatgttatataaaaatagcaccagctctttgcaatttacatgaatctggaatttttaattattttacatttcatagtgcagaaacatttagaaaattatgttcatatgaagaaacacaatttattggattacaattgttgttgaagagatgtattcctaataatgcagaatctcctgatcaatttattagctattttattgaattgttcagagatcttattaattctggaggaaattttaaatcaggattaaatgctaatgttctagcacaattgatacatttgtgtgctgaagaagcattaattggggtaaaaagtataaatcaagtggctagagtatataaattactacttaatagacttattactgaacttgtagagtttccatttcaattaaaaaagatgttacctgatatgctaagttactttgaacaaatgtgtaaacaaaaaaatgatgtatcatggtgtcgagcatttcatttagttaatatgtgcattaatagttggtattatggtgattatgcgttaaataaagatgaaaattataatagaatgcaaaaacttttaataaaatgttacaattcaatttttgaatacacatcatcacagaaaaaagctaattttatttctgaagactttctatttgaagatgtatggattgatatatataatgaacaaatatctaattcatttgatgaaacaattgaatttttaaaaccaattaatataaataaaattttaaatggccctattactaatgataatgaaaaagaaaatcaaaaatttaatttaaggcatctgtttagaattaatcttaaaattctagctattataatgcatggtgctaataaaacgatggaattagaaaaaaaagttttagttgaaatactaacttcttttaaaaatgacaatgatgatttgttcgattatagtgatatagatatttttggatgccaggatataatgaaaaattgtatttctttgataaatccagaaaatgatatttataaaaaatttatagatcaactagagttatattctgttcctaaattattattatttttacattatagtaataataagaaattatcagaaataattcatgaattaattataagaaagatagaaccggaatgcatggatgtttatggcaatgatcaagcgatagatttagcattgcaatataaaattaaagaattatacccgtttattcaagaaatactagtgaattacttgcatagaatggaaggaaaaaaaagttttcaatttgataacaatataataaatgctgataataagttgaatcatttattctattgttgggagaaatatgagaatattttgaaaggttccaactcattttataaggtacttgtgtatattgagagtgataagtatagagatttagataaggctgagatattaggttatgaacttattaataaagcagaaacggagtatgctggagcatatataaatttaatatatacacacgttcttcaaatagaaaatgctattaaagagaataatgaagatctgactaataatattcataaaaaaatattaaagttgtcaagaaaaattgagaaagataaaatatcggactggaatatggaacaaaaagaactttattgctctaatataatttatgaaaggcaattattaggcaatgatatcaaagaatttattgatcagttaaataaaaatttaaatttgaacttaaattttgaagagtataaaaaagaaaaagcaagtgtagtaacagaaaatatatcaatagattatgaaaatttaaaaaaatatttatggaaatatatgagcatgaattcaaaagataaaagcaggatacattatgaattgaaatcaatagaaaatttacaagatgcagatgaaacattgctattggaatgtattataaaaacatgttattctatcgaggcatatgggccacagcttgctgttggacgaaagatatcacaaaaaaataataagcagggggaaatagaaaatatagaatggaaatattatgaggattatattacacaactttatagagagatgttcaatttagcatttactgacatttataacttggcgataaatgatcaggaacagactggaagcactggaaaagcagttcataatggcagcaaaaagggatgttcagaaatagatttaacaataaaacagggaaatattagggtagggattttagaagcattagtattagaaggatgtaagaaagagcaaattaaagatcacatatgtaaagctattggtaacaacatacaacaatgtacagttagtgttgtgttaatttatggaacttcgaataaacaagctcaattatgggctaagtataaaaattataataatgtggaaatgactgagatattaaagcagaatggctacatagtagaagaaactactgaatttaacaaaagtccactttacgatgaagcgatttttagaaaaataccacttacagagaatattatttaccaaaaaattcgaaatcctaatggaatagaacaacacctatatcatatatatttagatttaagtaaggattcagtaactaaaatgagattaattgtaaatgattagtgttatttcttaagttaagtattaatattacttaatttaagaaatggtcggaagaagtaaaacttccatccatcttctgaccatctgtaagatatgctttattattttaaaatacaatatgtaaatatatgatatttataatctaaggtttgagttatttccaatgacaaatagatataataaaatatgttaagttataatttaataaaccacttcgacacacgcctcacgttgaaaatattatttaatttaaggtatattttacttatagacggtagcttgatataaagtaccgtttataagtaaagaactgggaagaatattttaatactacaatgttgcaaaaatgggtgggattttatatgaatatacatttaagagaatggtaggaagaattaaaacttccgacattctttctatcatcagcaaaatataataaaatggaatttaatatgctgattttggaatacataactcggctatcacaaacagtaaaattcaacaactatgctgataataatattaatgaatttgatattattatcagtttttttgtgttggcaaataaattcataaaattaatctaggttaataattcttaaggaatgtagtaaaaatgatgtgttgatgcaaaaattgaaaataaaatctcgttgttgcaaaataataaaaaagttgtactataaagcatcttaatttaatagtacagcaattcaaaaaaataagtgcgcaattgatttgaaaagtatatgttgatatttactgatattttaattttatttatatatcagtaaatgtgcaaagataaataattttttaattattttgttgctcaatgagtaaagcgtgttgcttattaagtaaaaaatgagtataatatatttggattgtaaatgttttacaaatataaaatcactgatgattggataagcatacaggggatataagaagtttatatagtggatctattgttgtagtatgaataaatgatttatttaatttatatttgttttgggatggtacttttggtaggttttatcataagttttagaatatattactcaaatatatgagaaaatatatatgtaggataaattaaataattaataatgtaccataaaaggcaaccgtattaataaacattttaatatttcatattacaagattagtctctatactgagtgctaaaaatttatatctagtgaatatgcagaatttattttgagtaataggatatttttgaggatatttaaaagggatgtgattaatatggcagtaaaaactaactataagaaaaatggtactaattattttagagtaagtgctgttttaggaacagatagcaagggaaaaagaatacttaaagagttttatggtaaaagcaaatctgaggctgaggagaagaagagagagtatctggaaggtataaaaaatggattaaatatagatacgaagcgagttcttctaggagagttaatacacacttggctatttgagactattagggtttcggatagaataaagcctactacgtttgaaaagtatgaggggttatacaggaattatgtaaaagacagccctttatattcaattaaattatcagaattaaaagcactccaagttcaaaggtattataatggtttatcagacattggaaaaagcagaaatcttattgaaaacttaaataaactcttgaaacaattttttaattatgcagtagatgaagggtatttaagcaagaatccttgtcttggtaaaaagatagttattcctggagaaaaaaaaccaagaaaagaagttcaacattttagtgatgaagaaatagagattttagtatccaacttaaaagataataggtatagggagttaatactattatcacttggaacaggattaagacgtggggagcttttggcattaacttgggaagacattgatttgaagaataaaatcgtaaaggttaataaatctttagctaaagtgtatataatagcaggtgatggttcaaaggaaagaaagcaaataattcaagtaccaaaaactcgagggtcaataagagaagtatcttttcctgataatctaacgtcaatatttaaagatataaggataaaacaaagaagagatagattaaaatgtggagaatcatatgaggtatctgatcatgtctttacaacctcttctggaagcttaatagatgtaacaaatctatctcatgcatgggaacatttattaaagaaatgtaaattaccacataaaaagtttcatgcattaagacatacttttgcaacaaagttatttgaaaacgaagtagctttaaaaactgtttcagaacttttgggacatagttctatagatatgactgcaaatacttatactcatgttattccaaagcaaaaaagtgatgcagttgaaaaattaaattatatatttaatttataaaatatttgcaggtaatttaaaaaaataatagtaaaacataataaaaaacttagtcgggaaaaagtcgggaaaatagaaaaaacaccaacaatttagctcgctaaatgctgatgttttctataatggtgacccataggagaatcgaactcctgatttcaccgtgagagggtggcgtcttaaccgcttgaccaatgggcctcacaacaaatattattttacactcatttatctattatgtcaacaacttttttgaatatatccgtaaaaaaggaaagagttagagaagagtgcttaaaatgtaaaaatgatttgttacattttatacaaatcataattttctaaatatttaaaaaacatacttgtttttcgctggaaatctgttaaactattatatagttagtaatttaaatagaggtgtatattgtaaaatatactcatcgctcctcttgtatgattttttgatcatacggaattacgactcctttttaatattttgtgggatatccattgagattttattgtttatgaacagtttaattttgatgggtattattttttatgataaattactatattttataataaatttacatttaaagcttaagtaaaccaaatgcttaattaatactagaatgaagaagatcgattgaaatttatgttaactaataactttaaaagcaaaaagaggattgtcaaaataaaatttgataatcctcttttttaatttatactacaagtttaagttatattacttgaaactattactttgaaatccactctaatacagcaggatttgcgcatgctgaagtttcaccatcaatctttgtaacaaaaataatatctcctccattagcaacagagcttacttcatcaaatatttcttttgcagataatgtatctgtttttacaaagaatccttcaggcataaattgagcccatgagcctaaagatttaattttaccgactatattagcaccgctatgtgcatgttcatgagaatgatcttctccgcatccacagctatcaccatgttcatgagaatgatcttctccacatccacaatcatcaccgtgttcgtgatgatggccatgagtatcgcttaaaaaatatgtaatcatatatgctgacattattatatcaatcccttctagctttttttatttatattaggttaacaagttatatttaaattatacagtaatattgatggttgtaaattatttctttgaaaatgttaaatgtggtgagtatttcattaagtggaatagttgacttttatttaaatataattattaatggggtacttgcaaaaaacagatattaattctatttttatggcaattacagaagtgaaaatttgatgagaattttattaatatagaaacaaaacttgacataacgcatataacataataaagcagaatattatatcatatttaaaattattttaagttagagaaattttttagttaaaggagggacaagtatatggattttgcacagtatataacacaaaatgctctgattttgattcctgctctatatattgttggtatggtaataaaaaatacagaaaaaattaacgataaatatattcctatgatattattatttctaggaatattaggggctgttggaatcatgggccctagcgtagaatcagtaattcaaggcatactggtaacgggagctacagtctatactaatcaactaataaaacaaagctgtaagaaagaatgaggattttaatttcccagtaaagatttaatgactacaattttatggttaccttattatattaaaattattttgaggtttattgctgacaagcagatactgtcaacaataaacctcatttttagttgaataaaatacaatagtcctatataatttaaaatacaataagaaatgatttttaggttcatataaagttaagtgtatatgattaaaagggaaagtggttaaaatccactacagcccccgctactgtgatggaagactaatctctaaagtatataataaaagtgctcattaattaagaattggctgcttttaaatagtatactaaaaaatccactgagaaattttcttgggaaggaagagaattaggatgaggccaaagtcaggagacctgcctaggagtttataaaaatgctattcttcggagggaagaaaacttgcaaatagcgggatgtagtagagtatattgtacattcttaatttgttatgtatttcctccttatctaacgataaaggggatttttatatattccaaattataaatcttatgaaatatttataaatttattaaattaaggtcttttttaagacaattttaggaggaaaatacatgagaaaagctattttagtagttagtttcggaacaagccatttagaggcgcttaagagttcaattgaaaaaattgaaaataaaatcaaagaggaatttaaagattatgaagtttttagagcttttacagctcattttataataaagaaattaaaggcaaaggataatttggatatattaacaccagaagaagcactagaagatttaaaatctagaggatttgaagaagttatagtgcagccgcttcatataattccaggagaagaatttgattacatcaaaggcgttgtggagcaaaggaaaaatgattttaaagatcttaagcttggaagaccgatatttttttatcaaggaatgaatggattaccagaagattattctttatttattgaaagtattaaagatgttttcgaaggtgaagaaagtgtaatattatttggccacggtacagaacatccatctaatgcagtctatggaatgctgcaaactgttttggtagatgaagattatgagaatgtttttgtggcaactgtagaagggtacccaacagttgaaaatgtagtaaagaagctaaagaaaaaaggaataaataagacaaaacttgttccgctattacttgtggcaggtgatcacgtaaagaatgatatggcatcagatgaagatcattctttaaagactaggcttcaaaaagaaggaattgaagtgaagttacatatgcacggacttggagagcttgataaatttgatggactctatataaatagaatttatgactcaattgagaataaatatataaacgctggaaggactaaaaaacttagatagttcaatttttatagttgcaaaattctttgcaggtagttaggtagagtttaaaagtcttgttagtacagaaaggaaaataatatgaggtctataattatatcttccaattgcagcggaggaggaaaaactacttttactcttgggcttatgaaagtacttaaaagtagaaattttcatgtacaaggttataaggtaggaccggattatatagatacagcatttcataaagcagtgacagggatagcttcaagaaatcttgatactttcttaatgggtgaagaaggtgtgaaaaaaagttttcaaaaaggttctggaaatattggtataatagaaggtgttatgggattatatgatggaattggagcaagtgaaaaaggttccacttatcatgtctcaaaacttttaggaaatatgccgatagtgctagtgttgtctcctaaggggcaaagtgcaagcatatgcgctgaaattagcggctttaaaaattataaggattctaatattgttggggtggtattaaattctgtcagtgaaaaatattataatttattaaagtatgcaatagaaaagaattgtaatataaaagtttttggatatattcctaaaacaccagaaatagcattaagcagcaggcatttagggcttgttcagagtatggaaattcttaatcttgaagaaaaattagatatatgtgcaaatttaatggaaaagtatgtagatatagatggaattataaatgcaactcaagagtataaaataagtacagatggtgatcttaataattcctttaaagaagatgataaacaaaaaagttttgaaagtttaaaagaagaatctagaaatagaaatttaaaaataggagtggctttagataaggcgttcagtttctattataaagataatttggaagctttagaaaatttgggtgagatagtttattttagtccaatcaatgataaagaattaccacaaaacttagattttttatatataggtggaggatatccagaagtatttaaaaaggaattggaaaacaattattctatgcgaaaaagcattaaagaagccttagatggcggcttgaggtgttatgcagaatgcggtggacttatgtatcttacagaatcaatagatggatcagaaatggttggtttttttaatggagatagcacaatgactaataagcttcagaattttggttactgtaatgttaagatagataacaaatgctttgataataagggattagaagataatgaatttgaagttaatgcccatgagtttcataagtcaaaggtagatttagatgaggacaatgtatatgatgtagaaaaaactttatataatggggaagtattaaagtggaaatgcggatactttaaaaataatacattaggaggatatgcccatataaactttcttggaaatgaagaattattaaaagcgttggttaactattaatcaatttattaaacttggaaagaggtgagcttggtgaggtgtttgttaaatccctcgctaaaaatatatggaatatttaaaaaatcctatgggaattgaagaaaaaagttttgagattattggtaacgaaatgggcgcgcactcatttagtgaagaagaactgcttatagttaaaagaactattcacactactgcagactttgaatataaagatttggtagaaataagtgaaacagcaattgaaactgcaaaaggtatttttaaacaaggtgcaaagatctatacggatactaatatggccttaaacggaattaataaaatggccttagctaaaactaatagtgaagttatctgctatgtgaatgaagaaatagttcataaagaagcaaaggaaaaaaatattactagaagcatggctgcagtggaaaaagcttgtatggataatgtagatatattcgtttttggtaatgcaccaacagcactttttaggcttaaagagttaataaaagaaggaaaggcaaaaccaaagcttataatagctgcgccagtagggtttgttggagctgcagaaagtaaggaaaatatggatgagcttaatataccttacataagaattaaaggaagaaaaggtggaagcactgttgcagcagcaatagttaatgcccttatgtacatggtggtttcaagataattaagtttattagattaaagatagttaaaaagttaatgatgtcaggaggtgatttttatgtttgaaatgtacgttgatgtagatggaaaaaggttaagatgtggatatacgacaggttcttgtagtgctggagcagcaaaagcagcaacaattatcttatttaataaagagaaaaatcttaatgaaatagagattgcaactcctaaaggaattgatgtaacaatgcctatagaattaatagaaaaatttgatgattatgttgagtgtactattttaaaagatggtggagatgatcctgataacactcatggaatagaaataaaggccatggttaaaaagatcaaaccaatagataataaaatatttcaagatgaagacttgcaaaagtttgatagtgttttagttgaagatagcagagcagaaaaagaagatgagttagaaagagtagtgcttaaaggcggaacaggagttggaattgtcactagggaagggctttttattcctaaaggacaagcggctattaaccctgttcctagaaagatgataaaagaagaagtattaaaagtgttaccgcctggagaaagagttgaagttataatttcagtgcctcaaggagaaaaagtagcaaaaaagacttttaatcctagacttgggattgtaggcgggatttctattcttgggacaacaggaattgtatatcctatgtcagaagatgcacttaaagcttccataaagatagaaattacccaaaaagcaataaataatgaaagattagttttaactttcggaaatttaggcgataattattgtaaggaacttgggtttaaagaggaagaagtggtaacatgttcaaactttataggatttgcattagagacttgtgtttcatgtaaagttaagtctattataatagttggacatataggaaagatgagtaaaatagcttatggatgctttaatacccatagtaaggtcaatggagtgaggcttgaagttattgcattagaacttgcacttcttggatatgatatgtcacttgtaaaaagagtgcttgaggaaaagacatgtgaaggtgcagttaaaatgcttggagatggatatgacaaactctatgagaacattggaaataaaatagttcaaaaaatcaaagagcatgtttatggagagctagaagttgacgctgtaatgtattatggcgcatcaaatccgattttattatggaagtccattaaggataattaataataaagttcaatataaattttatgataattcattagattatggattgtgtaaaatattttagggattaatattaaaaagttaattaagctttcatagggggacacaaaaatgatttatattgtagggcttggtcctggacacagggattatattatgcctaaggccttggaaatattaaaaaaatctaatataataataggctttaaaagagcattggattccttagagtttgtagataataaaaaaatatatataaataagctaagtgatattaacgaatatatatgtgatgagaaaaatagaagtatgattatttcaattgttgcatctggtgatccaactttttatgggataacaaattatataaaaagtaaagcaactttagaatttcaagtaataccagggataagctcttttcaatatctgacatgtaaattaaatatgtcctggaataatgcgtacctaggaagtttgcatggaaggaaagaagactttttgactgtggttaataatcacgacttaagcatttggcttacagataaagagaataatcctgctatgttatgtgaaattttgcataaagaaaaagttagatgtaaagttgcaataggagaaaatctatcctatgaagatgagattataactaatggggctccagaggaatttatgaataaaaaatatgattcactgagtgtgtttatagtagatagaacaagtcgatagaacttataatgatttttgtgtgacgttgacgtttgattaatacctgaaatagaggaggaaattttcatggtttttataaaagatgaagagtttattagaggaaactgcccaatgacaaaggaagatataagaatactttcaattgcgaaaatgaacttaacagataattctttagtactagatgttggcagtggtacagggagtattacagttcaggctgctaaaattgcgaaaaacggtaaggtgcttgcaatagaaaaaaattatgaagcatatgaaattacagaaactaatgtggaaaagtttgaatgtgataatgtaaagattttaaataaagaagcaagtagagtactggatactttgatttttcaaggtttaaaatttgattccatattcattggaggcagcagcgggcatttagaggaaatattacttaaggtaaatgcaatcgtagtaaaaaaaggcacgatagttatgaattttataaccttagacaatgcatacagagcaattgaggtaatgaagaaactagattataaaattgaaatttcattagttaatataagtaaaaaccgtgaagatactttaatgatgatagctaataatccaatatatataattcaatgtataaggaattaagtataatttaataaagatttttaagataaaataatacatagttgttataaataaaagtgtataaataaagataatatgatatcggtaactagaattaaaataataatatatacatatgtagttacttaggaagagaggaattataaaatggcaacattatacggaataggtgtaggacctggagatactgaacttttaactgtaaaggcagtaagaacaatagaaaggtgtcaagttgtagtcgcaccatctgctactgaaggtggagaaagcattgcgcttgaaacagctagagaatatataaaaccaggtactgaagttattgtaaaacattttccaatggggaagaaagatagagtaataaaagcattggaggcttatgaatttatagaagcgaggcttaaagaaggaaaggatgttgcatttttaactattggagatccgtatatttacagtacatatagtcatatgttaaagcatgttagagattgtggatttgatgttcaaacaattcctggaataacatctttttgcgcggctgggagcttagttaataggactttagttgtaggtgatgagaagctagtggttatgccagctactaaagtgaaagaaataacagatgaaaagtttgttgtaataatgaaagtatacaagcatgaagaagaagttataaatacattagaagaaaaaggctttgattatgtttatgcaagtcgagttggtagagagggcgagactgttttaactgaaagagaagaaatactaaaacttagagattatatgtctttaataatagcaaacagggaataaatataataaaatattagttaatttaatattaaaaaaggagtgttttaagcatggtttattttataggggcaggtcctggagcagctgatttaataacagttagaggtcgtgatttattagaaagagcagatgtagtaatatatgctggttctttagtttcaaaagaacatttagaatattgcagaccagacgttcaaatctataattctgctaatatgactttagaagatgtaatggaaataatgacaatggaagaacaaatgggaaagttagttgtaaggctacatacaggtgatccatcgatttatggagctataagagagcaaatggttgaacttgacagggttagtataccttatgaagtcgttccaggtgtaagttcatttacaggtgcggctgcagctataaatagagaatttactttaccaggagtatcacaaactgtcattttaactaggattgagggaagaactcctgttccagcaaatgaggatcttgaaacattggcatctattggagcatcaatggctatatttttatctatttcaatgatagacaaagttgttgagaaacttagaaaagggtataaaaagaatgttgcaatagctgtagttgaaagagctacatggcctgatcaaagagtaattatgggaacgcttgatgatatagcagaaaaagttaaggaaaataacattactaaatgtgcacaaatattagttggagattttattgatagcgattttgaaaaaagcttgttatatgataagagcttttcgcatatgttcagagacgctgaggatacaagtaatgaatctaaataatgaagaactatctaaaaagtcccaaagtgaggcaataaattcacttagtaaaaatataagtataatttgtccatcgcctaagggaaaagagataggattgaagcttaaagaaagctttaatggaagattatatataaaagaaaataatccatcacaagatcagattaataattggaagttagaaataaacacttttgcatatggtgaagatttcagtttaaagactattacgaaagaagctatgaataattcagaaggtatcatatttatatcttcaacaggaattgcagtaagagcaatagctccatttcttgaaggcaaggataaggatccaggaattgtagtagttgatctatcatgtaaatatgcaataaatattttaagtggacatttaggtggaggcaatgagcttacttataaggtatcagaaatattaaattctatgcctattataaccactgcaagcgataatttaggcttgattgccccagatattctagcaaaagaaaacaatttgattattgaagatttaaaaaaggctaaatatatggcggcgcttctaattgatgaaaaaataattggaattaaagatgactataatataattaaaatcagtaatggatacgaaaagatacagaacttaagaaaggattgtatttggataactcattgtttaaaaagtagtaacaatgaagatgttgaaaaaactgattattctaggatacttagacttataaaaaaagatatagttttaggtattggttgtaggaaaggcacaacttatgaaaaattatatgactttgtaaatgcgaatttaataaaatataatttggatataagagcagtgtcaagaattgtttctgtagatattaaagctaatgaagaaggtattataaaattagcggaaagaattaattgtccattcaaaacttttagcaaagatgaaataaaaaccgttcaagataaatatgataaaagtgaatttgtatttaaaacacttggaataactggggtctgtgagccttctattgatcttgcaggcgcagaggttattataagcaaaataaagcatgaaggtatgacattagctataggggtacttaaaaacatattggaataagttctaaaataaatccttgatgttcatgcgttgggaaagtatgctataatatagctgatgaagcatttattttaaaaagtaggggagaagagaatatgacgattttggacatgctaaataaaatgaatgggaataatacattaatggctaagtcattagaaattattaaagacaattatacaagtttagtaaatgacaattatgaattgactcttgatgaaaatagagaattaagcgtaaagattcctagtcttgaaagaagaaatgaatatgtatataaaagtgtggctgagtacccttatccattaattatgtgcatgagaatcttagaaagtagtaatgttgaaagatataactatatgctgtctaaattcatggatttatatagagataagttggatttgttatttaaggatgtacatatcgttgatacattaaaagcgaaaatagtaaaaactaaagatagaatagattacgtaacatattattcaatagctacaggagctattggtgcagtattattaattatattcaattttactaataatgtaaaaaatgccattacaataggaattatagttttttttattcttgcattattcatgcagattacaaaagaaagccaagtaaaaaagatagttgatgcatatataagcttaataaaaacagaatggtatcaaaaagaattaaataagcaatatacatacctttgcaattttatagaataatataaattcattttcattaactaaatattctatactaaaaaaacttactaaaaatttatttagtaagtttttttgtatttaggaaaatataatgtaattaaatcagcggataacgtttatattaatccattttactagggttaaatagactaatataaaagaataaaaaatgtcatttactatgattaaatattttttcttaaagatgatgattcaacaaatacaaatttatccggtctatgacgagattctgtatattcaaaaagtttaccggaatcagtataagcatatgtttttacgacagcaacacaatcatatgtacctaaatctaaaaatcttttatctaattctgttgcatgttcaacaacaataatcttttttgaagcaagaatttttgtatttaaatctttttcaatatattcatacacggaattttgagcaatttctatagtcaaatcttttgctacatcagcactaaaataatttacatcaaggataattggttcattatcatagaatcttattctatgaaggtgatatacttcagtatctaattttaaagcagttattcttgataaagattcatctatagttatttttgagaaatgaacaacactagtagtgaatttcttttttgtatgtaattcttgcaagccgagtagatttccaataggaagttctattgattctctgctttctagtatgattacgcccttacctttaacgcttttaacatatccatctttactcaattcactaattgctcttctaacagtatttctactacattcaaatttatcaactagctccatttcggtgggaagcatcatagaattatcgtacttaccactatctatattgctttttaatatgtgatatatatctttgaattttacattaggcaaagttaacactcccttaagttatcttgaggtatatatgctgcaattggatttctacatcttatacttaattgagcgtttatccaactagaattttaaatgcagatttatcattggagcatatataaaatatttgtactatagataactcaactataatctatacttatgcgtatacctcgccgaaatgaaacattccatattatgacccttgtggttacaaaagtttattactcatttctggttgtgaggtattccatagtctaattataatttatgattgtgttatctataggttttaatgaatatattatactttattttttttaataagttaactaaataattaaaataataaggtgataaattacttggtgcaatttattgatgtatgataatgtaagtcactccaacacctaaaaaatttgcactatatagacaaacaacttgaaaattagatttgtaaatttaaatttgatttgatgagtcagtaaaagggtggaaaatctaaaatttgaataagttatttgaacaaatttaaaatatgtttaaacatattttaaatttattttatgccataagatggcttgaatactgaatattaaacattttcaagaaatttgtttaaacaaatattaaaaatattattgactatatgtttaaaatagattattatgatattgtaaacatttaaatgttaggtttaatataaaatttattaattaattgttcaattggactaatacaaaacaaaattgtattaatattcatgaacttattctttaaagtaataaaaatcaaattggaggttttaatgatggggaaatttcaaaatgatgcaaaagaactattaaagctagttggtggaaaagaaaacatctcagcagttacacattgtgttactagaatgagatttgtattaaacgatccaagtaaagctagcgtaagtgaaattgaaaaattaaaaagtgttaaagggacatttacacaagcaggacagttccaagttataattgggaatgaagtatcaacattttataatgactttatagcagtttcaggaatagatggagtaagcaaagatgcggtaaaagatgttgctaaaaacaatatgacttttatacaaaagcttatggcaaatatagcagaaatattttcaccacttattccagcaatcattgttggaggtttgattttaggatttagaaatgttatcggagatatgaaattattagaaggcggaacaaaatctttagttgaagtatctcagttctgggctgggacaaacagtttcttatggttaattggagaagctatattccacttcctaccagtaggtattacatggtcaattacaaagaaaatggggacaacccaaattcttggtatagttttaggtattacattagtttcaccacaacttttaaatgcatatgcagtggcaagtacaccagctgataaaatacctttctgggattttggatttgcacatgtaaacatgattggatatcaagcacaagttataccagctatacttgcaggttttgcattagtatttcttgaaagaggtgcaagaaagataagtccagcatcaatatcaatgatagttgtaccattctttgctttagtaccagctgttttgatagctcatattgttataggacctataggctgggcaattggtgcagctatttcaaaagtagtatatggtggacttacatcttcatttggtatgatttttgcagcaatctttggattcctttatgcaccacttgttattacaggacttcatcacatgacaaatgcaatagatcttcaattaatggcacaatttggaggaacatcactttggccaatgatagcattatctaatattgcacaaggttcagcagttttagctatgatatatttacaaagaaagaatcaagaagctcaagaagttaatgtaccagcttgcatttcagcttaccttggagttactgaaccagcaatgtttggtgttaacttaaaacatggattcccattcttctgtggaatggcaggatcagcaatagcagcaataatttcagttggaagtggcgtaatggcaaactcaatcggtgttggaggacttccaggtatattatcaataaaaccagcgttcatgatgatatttgcattagcaatgcttgtagcagtagtagtaccatttgttcttacagtaattgtggggaaaaagaaagcaataagctaggataggaaggaagaaattatgaaggattttaagaaaagtactatttatcaaatatatcctaaatcattttatgatacaaacggtgatggaattggagatttaaacggagtaatagaaaaattagattatttaaaaaatttaggtatagattatatatggcttactcctttttatccttctcctcaagtagataacggatatgatatctctgattactataatattgatccaagctttggtacattagaagactttgaaaaattagtacaagaagcagaaagaagagatatatatgtaatgcttgatatggtgcttaatcatacatcaacagaacatgaatggttcaaaaaagctataagcggagatagaaaatataaagatttctatatatttaaagaatcaggaaaagataaaccacctacaaattgggaatctaaatttggtgggaatgcatgggaatatgtagaaaagtttgatgaatattacctacatctttttgatagaactcaggcggatttgaattgggataatgaagaagttagaaatgagatttatggtgttgttaacttttggcttaaaaaaggtgtcaaaggattaaggtttgatgttataaatttaatttcaaaaccagaaaagtttgaaagtgattcagaaggtgatggaagaagattctatacagatggtcctaaaattcatgactatctccacgagcttaatgaaaatacctatggaaaatatgaagatattgtaactgtaggagaaatgtcatcaacttctcttgagaattgtataagatattctaatccagaagaaaaagaattatcaatggtatttaatttccaccatttaaaagttgattactataaaggcgataaatggactgttatggattttgactttatgaagttgaaggcgttatttaaaacttggcaagaagaaattcaaaatgggtggaatgctctgttttggtgtaatcatgatcagcctagaatagtttctaggtttggaaatgataaagaatatttaaaagaaagtgctaaaatgctggcaactacaatacacatgatgaggggaactccatatgtgtatcaaggtgaagagattggaatgacaaacccttatttcgataacatagagaagtatagagatgtagaatctataaattattataatattttaaaagagcaaggaaagtctgaagaagagatattacagattttaaaagcaaaatctcgtgataattctagaactccagtacaatgggatgatagtgaaaatgctggatttactaaaggtgaatcatggatacctgttagcagtgaatataaaagaataaatgttgaacaagcgctaaaggatgaagattcgattttctatcattatcaaaagctaataaggttgagaaaagattatgaagtgatttcaaatggaagtataaagtttattcttgaagaaaataataaagtactttcatatgtaagaaatttaggcgacgctacagtacttgtcataaataatttttatggagaaagtacaaaagtagagattccagatgaatatgcaaatgaaagtgctaagagtaaaatattaatatcgaattataaagatagtagtgtattaaataaagagttaaatttaagaccatttgaatcaattgtatatcatatatagataacccaactataatatatacttatgcttataactcaccgaaatgaataacatacttttgttccagtttctaggtaattctgataggtgattctaaggctataaagttgcacccaaagtgctagcttcaaagaacaagctttgaactagcacatttggaacaacttatagccaaagaatcacatctatcaaaattaccaatgaaacattccacaaaagtatattactcatttctagttaaaagatatttcatagtctaagtatagtttacgagtgtgttatcaatagaaaattaggaactttagaattatataatatatggaaattacagtagcaactgttcagcaaatgggtggttgttacttttttgtacagaaatttattggagcttccagtgttaatacgtgagtttataatcttttatgtgcgcagtttatatagagagagaaaagatgaagttaaagttagttatattaatatttaacgaagaggctggttttttcaaaagataagtcttgtaagaataggaattaatataaaagctatattaatatatcttatgaattagtataataattaaataagatatattattaagaaggaaggtggattagctctgggtatactattaaagttattaaagtatgctgcagactaaaatgtaattatgaatgaaaagattagtactataataaatgaaatgataaaatactatgcaaaagatccaagaagggttaatcactttttaaaggtattttcttttgctaaatctataggggaacttgaaaatatagataagaagactcaggaaattttagaagtagctgcagtaatgcatgatataggaataaaaattagtgaagaaaaatacaattcttctgctggaaattatcaagaacttgaagggcctccagttgcaaaagaaatgctttcaaaatttaattttagtgaagaatttattgaaagagtatgctatttgattgggcatcatcatacatatagcaaaattgatggtattgactatcaaatattaatagaagctgattttttagttaatatttatgaagatgaaataaaaactcctcaaattgaaagtataaaaaataaatactttaaaacaaaatcaggaacagaatttttaaatagcttatacctgtaatataaaataaggggtaataaaatgatagaatataaaaatttggatagagaaattattagagaaatttcagaagtttatgtaaaagcttttaattgtgaaccgtggaatgacaaatggactattgaaagtgcatctaaacgcatatctcagatgataaattgcgaagggtttaatggactggttgcatttgatgaggaaaaattagtggggatgatacttggaagcattgaatattattatgatgcagtactttttcaaattaaagaactttgtgtagaccctaaaattaaaggcgcaggtataggttcaaagttgctgagtgaatttataacaagattaaaagctaaggggatagatagagtgattttgctgacacttaaaactaatgaaacagaaggtttttataagaagcatggattcaaaacttttgagaatatgataatgatgggaaaggaaatctaaaaaatatataatatcatcgaactggtttttatatgtaaataaactgtctaaaattatatatgggtattctgaagaatagatatttaaatattcttcagaatatctattgttaggaatattagaatatagaacacttaatcatatattctaattattctctagaatcgtaactagcacatttagtttcagtatataattgggctccattacctgctacttgtatagaatctaggctacaaagtttgttagtgttatgattacatgtttcaacgttgcaagttagagcatcgcattttccttgagaattagtattattagttaagtcactataatgagattcttgtaaaaatgaaccacagcaagttcctctttcactacttgcagacattccaccaatatcaactctatttgaatagcaaactccactattgttgtgtgaacaattatttacttcacaattaattttttccacaaaaaacacactcctttaagttaaatattaatctagttataatattatttgctaaagtatctatcaagtaagcctttaaatgctttaccatgtcttgcttcatctttacacatttcatgaacagtatcatgtatagcatctaaattatgctccttagctaaggttgcaagtttctttttaccttcgcaagcaccatattcagcttcaactctagcacttaaattagatttagtatcaggaacaacaacttcccctaaaagttctgcgaatttagcagcatgttctgcttcttcataagcaattcttttatatgcttcacctacttcaggataaccttcacggtcagcttgacgggacattgctaagtacattccgacttcagtacattcacctatgaaattagctcttaagccttctaataattcatcattaagaccgccagcaacacctattctatgttcatcagcaaaatttaatgagtcagtcatttccttgaatttgtcagcacctgctttacagataggacaaaagtctggtggtgtgtcaccttcatggatataaccacaaatagtacaaacaaatcttttcatttaaaattcctccataaactattattgtattttttaggtattaaacaaccttaaaaatagtattaccaattaaaacaaaaatattaatatataatttttattaattaaattattcaggtgtcgtataattttctaaatatgttataatttattggagtgatttaagagtgataaacaaggaggaatttttacttgaataacaattttgaatatatattatttgatttagatggaacacttactgattctggcgaaggaataactaaatcagttcaatatgctttaaagtcttttggaattttagttgatgatcttaaagagttaaacaaatttattggaccacctttaaaggattcgtttaaagaatattataacttcgatgaggaaaaagcacagcttggattggtaaaatacagagaatattttgctgaaaaaggtatctatgaaaataagttatatgatggaataccagaacttctagaggtgcttaagaaaaataataaaaaaattgtacttgctacatcaaaaccagaagtgtatgcaaggcaaattttacaatactttaaaatcgataaatattttgattttgcagctggagcagattttgaagaaacaagagtaaataaaggggatgtaataaaatatgctttacaagaggctaatattacagacttatcaaaggttatcatggtaggagacagagaacatgatattatcggcgcaaaagaaaataatataaaatcagtgggagttctttatggttttggagatgttattgaactaacccaagccagagcagaatatatagttaaggatacagaagaactattgaatattcttctttaaaaaattataaatcagttatataaggataattatgttgatatcttcaatactcagtaaagaaatataaaaattaattttattgtaacatcagttacggaagtaatatggaataaacattataataagattaaagataaacaataaaaacttaaaagataatttattaagatatatgagaggagaatgtcaacatgataactaaggatttaacaataggagaaataattcgtataaaggaaaatgcaccacaaattttaatgagcttcggaatgggatgtgttggatgcccatctgcacaagctgaaacaattgaagatgcagttaaagttcatggaataaatttagaagaattattagaacaattaaataaataatatacttaatagaaaggctgcttaaaactaagcggtctttttttgtgtaaagaaaatcatagatatttataaatgataaaatctagattataatatcaaataaaggattttagctgaaagggggaaaaacattgactttgcaacaattaaaatatgctcttgaaattgcaaggtacgggtcaataaacgaggcagctaaaaaattatttatatctcagccaagtctatctaattcaataagagaacttgaaagtgaactgggaattgtaatatttgagaggaccaatagaggaattagcatttcttcagatggaattgaattcttagggtatgctcgccaaataagtgaacaagctgaatttattgaggaccgctatcatggaagaagagaaaagattatgcatttctctgtgtcaactcagcattatgcttttgttgtaaatgcatttacaaaactcttaaaagaaattgaaacaaatcagtatgagtttaatttaagagaaacaaagacatatgaaataatagaagatgtaaaaactcttcgtagtgatgttgggattttatatattaacgaagtaaactctaaggtcatgaatagaatttttagtgatagtaatttgaaattcactccactttttaatgcaaacccacatataatcataagtaataatcatcctctttctaccaaagaaagtgttactactaatgagatgttagaatttacttatataacatttgaacagggaattaacaattcatttaatttttcagaagaaatgatgaatatggctaatgtgcctaaaagtattaaagttattgatagagcaacactttcaactttattaaccagtacagatagttatacaattggaacaggatttatagactctgattttgatgaaagcaaacttaaagcaataccaatagaatgtgatgaaattttcacagttggatggatagcccataaggatattaagcttaataaaataacaatgcgctacattgagattctaaacgaaattatttcaacaaattatttagacttaaattattatctgttatagcagtttaaatggaggaaaatatgagtaatgagattataggtacaaagagaaatagtccaccttttcgatatgatatagttggaagttttcttagaactgatgaaattaagattgcacggaaacaatataatagtggagagataaatgctgaagagctgagaagtattgaagatatagaaataaggaagcttatagaaaaggaaaaagaaataggattaatagctgttactgatggggagtttaggagatcttggtggcatcttgatttttttgttggaatagaaggtacaaagaaaataacattaaatcaaggaggtagtgttcagggatctagaacaaaagctgaaagctttcaaattgtcgataagataagatttaataagcatccaatgttagagcattttaagtatttaaatagcattgttaaggatcaaaatattgctaaatttactattccatcaccatctctctttcattttgttcaaagtcacaataaaaataatgtatatggcagtgatgaagagcttatggaagacattattagtgtttacaaatatgcaataaaggagttttacgatgcaggctgtcgttatttgcagtttgatgatactgcatggggaaccctatgtagtgaaagacacagaagttattttaggagtcagggaattaacccagaagctcttgcgaagaattatgtaagattgataaatgagagtgtcaaagaaaaaccagaagatatgattataactttgcatgtttgtcgtggaaatctacattcaataggatttgcatcaggtggatatgaacctattgcagaagaattattttctaatgctaaggtggatggattctttcttgaatatgatagtgaaagatgcggagattttaagccgctaagatttataaatgatcagtttgttgtattgggacttgtgacaacaaagcatggaggccttgaaagtaaagagcaattaaaaaatcgtattgcagaagcttctcaatatgtagatattaataaactttgtctaagtccacagtgtggttttgcatcaacagaagaaggaaatataattaccgaagaagaacaatgggagaaaattaaactcgttattgaaacagctaatgaaatttggaagttatagattgtcataagggctagtttagaagtttgctttttaaaagtgaatttgtttgttataggaaaatattatagccagtaatagttttttgaagttaccttacttggggttaaacatgctatactgatttcaagaataaagcaaggcaattaagggggattaaaaaaatgagtatagaatttaaaaatgcaaaacaaagaagtgttgcaccatttagggctgatattgtaggaagttttttacgaccagaggttattaaagaggcgcgtgctaaatttcaaaatcaagagatttcaagtaatgaattaaaaagaatagaagatgaagaaataataaaattagtgaaaaaacaaaaggaacttgggcttaaagcagtaacagatggagaatttaggcgctcatggtggcatcttgattttatgtggggattagatggggtagaaaaacgtgtactagaaacaggctataaatttaacggactagaaactagagcagaaacagccgcattaacaggaaaaatagattttagtaatcatccgatggttgaacattataaatttttaaagagtatctcgggagatgatgtagtcgctagacagactattccagcaccggcacaatttcttgcagaacttcaacgtggtgaaaataaggagattacagaatctatttataaaaacatagatgagttaattttagatattgcaaatgcttataaaaaagctattaaagcattctataatgaaggttgcagaaatcttcaacttgacgattgtacttggggtatgctttgtgataaaaaatattgggaagctagacaacaagaaggcgtagatacaaatgatattgctaaattatacgcaaaggtaaacaacttagcaattgaagatcatcctgaagatttggttattacaatgcatgtttgccgtggaaattataattcaacatgggcaggatctggtggatatgaaccagtagcagaaattctttttggaactgtaaatgtagatggattttatctagagtatgatacagatcgtgcaggagattttgcaccattaaggtttatcaaaaatcaacaagtagttttagggttaataagttctaagacaggaatattagaaaataaagaagaagttagagaaagaattagagaagcaacaaaatacgtagatattaaccaagtttgcttaagtccacaatgtggttttgcctctactgaggagggaaatgttctaacagaagaagaacagtggaataagataaagttagtaagagaaatttcagaagaaatttggaaataaaaatatatgatttcttccttaagtgagtataatataattatattcataggctaatttgaaagataaaaagcaaattagaaggaggattcaaatgagagtaatgacctttaatttaagacgtgatgttcctatagattttaatgatagatggaatgctagaaggagcttgatttataacgtaataaatgagtataaatgcgatataataggggttcaggaaattaaagataatatgcttaatgatattaaagaaaatattgaagtatataatattattggagccccaagagggaaaaaagtttcttccgaaaggaacagtttattactctctagaaattatttaattgaagattataaaactttctggctatctgaaactccagataagataggaagccgcgtatggtactcatatcttccaagaatttgcacaacagccattttacaaatggataatggaagaagagttagggtttgcaatactcatttagataatctgcttccaaaggcaagaatgtatggtttaaaaaagattttagaatttatagaagatgaaaaacttccagttatattaatgggggattttaatgatagacctaatagtaagttgattaaaagtcttaaagaggggaaaatatcaagtaaaaaattattaccagtacaagacgtaaatatgggtttatataatgaatctacaataggaaatttcaaaaggtcaggaaaagggcttcatatagattatatatttgtatcggaagaaatagatgtagttaatgctgaaataattaaatataatgttaatggtaagtatccctctgatcattacccgttaatggcagatatagtaataaattaaatatataaaaatttaaataaagcattagtaaaaaaacttggaattctaagattatgaatccaagttttcttattgtctcgaaaagtataaaaattttgaattttgaaagctagttatataagtggttaagaagatgttggattgtaaaaatatgattaagaaaataaatcatattcgcctacataaaatgttcttatatgcacaatacggaacttaataacagtcgcctgcgatttttttacttctctagaattttatattatagtggaatctcaagctacacagccggcggagattttgttgttatgggatttttagtaaattaacaagttgaaattatattttgttgattatactggatataaatacataataccccaattaactttaaagtgaagaaaaaatattatataatagtatatattgtaaataaattaaaaataaaataaaaaaatatattgttaatataaaggagaataaatttattgtcgaaattagagaaatgtgtatgcgtaacatacatatgtttagcaattgtcttaggtgggcttgcagcttattgtaaagtaacatttggtgaaataaattacagcggcttaatagctagaaaagataagaagccctctgatgtaaatgtgaatactgctaataacaatgagagcatagaaaaagtattaactgccgcacctaaagtgccgataaaagcagaattaacagcctactgtaattgcgctatatgctcagaagcttggggctcagaaaccgcaatgcagacccatactagagttggaactatagctgtacctaaaaatattccgttaggaagtaaaatatatattccggatttaaaagattataaagatgacggtatttttgatgcagaagatagaggtggcgcagttaaagttaaaagcgatggtacctatataatagatgtgtggcttccaacccatgagcaagtcaaggaatttggaagaaaaaagactacagtttatctaataaaataatagtagcttgaagtttttctaatattcaattaaaattatgttagtatgaggaaataaagcaagaaaaaaatagaatatatattgcaaaaatagtcctttatcataattctaaaaaatattacaagaattttagttgtaattgtgaattgtgaaatgtgcattgcaatatatattacatatattttgttaagaagagtctttttttagactaagggggacaataggcttatgggtcaatcaaaagaaaatgatcaaatattttgggacagtagagaaaacattatatcaccagaattagttgaagaaagaatagaagagatgaatgaaacgttacttgtttatagatcagcaataaaggaagttaagactaaattagatattttagatgatgaacttaagataaagaggaagaggaatccgattgaatacatgaaatctagagtgaagactccaagcagtattatggataaacttaaacgtaaagggttcgaaatgagcattgaatctgctaaaaagaatttaaatgatattgcgggaattagagttatctgttcttttgtaggtgatatatatgatatcgccaatatgctaataagacaggatgatataacactaattgaagaaaaagattatataaacagtcctaagccaaatggctatagaagtcttcatttagttatagaggttccaatatttttttcggatcatgtggagccagtcagagttgaagttcaaattagaacgatagctatggacttttgggctagccttgagcataaattatattataagacatctggagatggaccgctgcatattacgcaagacttaaaggaatgtgcggagcttatagcatctacagatatgaggatgcaggatatacaaagaaaggtagaaaaactaagataggtggtttgttaaaatgataaaagagcttgtattgaaaaataggtcatataggaggttttatcaggataagagcattgatatgaatactttaagagacttggtggatttagcgaggctatcaccatcaggagctaataaacaagtattaaggtatattttatcaaatgaaaaagaacaaaatgaaaaaataagtaaatgcatattttgggcaggttactataaggattgggatggtcctaaagaatgcgaaaaaccaagtgcttatatagtagtactaaaggatacaagtcttggccaaggtgcgccgcaagatgatggcatagcagtacaaagtatgttacttggagctgttgaaaataatttgggcggatgcattataggaaatatagatagaaagaatctaagagaagaactaaatttagatgaaaaatttgaaatttccttggtagtagctcttggttatcctaaagaagaagtagttatagaaaatataaatgaatctggagatgtaaagtattggagagatgacaaacaagtacatcatgttccaaaaagaacattggatgatttgattttataagtagtgaactcgaatctgttatttgatgtgaatcagttaagcagacatttcaaaagtgatgatcaaaatcttgtatttggctataggtgaagggttcttaattgcagaatagctgtttaatttataggtgaagaactttctctgtaagcatctatgatttgattatggtcgcttactctgtgagtatcagcgagcaaatgtgagtcgattttctttaaaaaatattgatataatagtgtgattttgaacatactatacttgttactttgtagaaaaaggagaatagtatatatggaaagaatacattataatgttgatggattagcaaatgaaaatatgaaaacacaagtcaaaaatgcactggaaaaaatccaaggtgtagataaggtttgtgtagatcttgcacgtggaagtgttgaagtagtatataatgctcctgcaacagtagaagaaattaaaagctgtatagagaatacaggacatgatgctagataaaagaaaatatctttttagatttgttgctaaagaggaatgtatttaggtttacattcctctttagtttttatgtaaatataaaatttaaccaggaaggattatccttctattatttttacataaaacattctatccctaggaccatcaaactcgcagaaatatatgttttgccatcttcctaaaattagattgccattatttaaaattagagtttgtgaagcacctactgttgaagattttagatgagaatgtgaatttccttcaaaatgcttataattaggatctgtggttggataagttttttcaaaaccatatattaaatcgctaactacatctggatctgcattttcatttatagttattccagcggtagtatgagggcaataaactactatgattccatttctaatattactgtttttaatatcttctcttatataagaagttatatcaaccatagattgtctaggtttaatttcgagggagtgtttaaataaatttgacataataaagcctccttaacattgtttttacataatattataatataccagttatgtaaatatataaacaattttataaatctatattgtaataatagacttagattttagattctaatggaccagataattaattatgagtagggtgtagaaacttaattgaaccatatatacagcagtgtaattgaatttttttattctctaggaatttatattcaagttaaatctgtgtataagttatagaaaagaccaattcagaaggttacggtttgtaaagagaataaaaaagaaaatatattcgcctgccaaatttttctcacatacgttcgaaaaggcagatgcgtaaaaaaaatctacggctccacagtcgcctacgttttttttatttcagaattttaagtctattttataaattatgttaataaaaataatagtaaatatagatttttgatttggagaggataagaaaatgataaaaactattagttttaaatatatattaatgttaggaactttattaagtattatatttgcatttcaattaatttatgatgtgaaggcaaatggggaatgggtgtatgtaaacaatagctggcgatattatagtggtcccgaacagaatactggttggtataaatacaaagataattggtattatttagatgaaaacggtatggcaaaaaccggatggcttaaaagtgaaggcaagtggtattatctggacacagttacaggaaaaatgctgagtggatggattcaaaatagagggaattggtattatttaaatagttctggagaaatggtgacagggtggcttagatataatggaaatttatattatttaaattcctctggagtaatggttaaggacatatatattggaacttattatttaggaccagatggggcatgggaagaaggatagatagttgaaataaattatcctatagatataaagtgaaattaccaatctgtgaaaacttggaaaaataaaaaatactatttcaaaatgtattagtaaaaaacattgagagatagtattttttttataataattttatatctaaaaagaaaaagcttgtcctagaaaatgctaaattggagctttattgacctatcaacttatcgttttcaaagatatgttcaattaaccaatcatttaaaagctgtaatagagtagaaatcgattcattctgattttcatcaatactcctaaaatctacttcattaattctttttataaaagcgtcatgttctatcttttgagtgaacattcttttatagttaattttattcatatattcttcttctgctttaaaatggaatgatgtatagtcgcgtagctcatctactaactctaatatgttatcatatttatcagttgtaaaatcattttttagtagattgtaagctttgtctgctatttcgaagagaactttgtgttgttcgtcaataaaatcaattccagtcttaaattcttctttaaattcatacattaaatgttaccttctttcttataattgtataattacatataaaacaattatatatcacttttgtaaaattttctagattagggataaagataattcttatcaataagagtaaatagaattggtatatataagaaactatataaatcctgctaaattaatgatacagtagtattagataattttacagcaattatcaatataaactatatattgcacttaagtttttacattttaagattaattgagttcttttttattaatattttaaatgtaaacttgctattgcaatacaaaaactatgaaaaaataaatgagaaaaggaattggaatttatggaagtgattcagaacatagataataatattttagaatttatacaaatacatatgaggactcccgttttagataaggttatgccactaataactattcttggaagcaaaattactatatggacgtttattgctttaatacttataataggaaaagaatataggaagtatggtattatgataatatgttctttgatattatgttttattgtaggaaatttaggtttaaaacctttagtagccagaactcgtccttttaatgctgaaccaatattaaatatgattcatatgaagctgccaacagatttttcttttccgtcaggccatactatgtgttcatttgcaccagcaactataattaattatatgaataaaagagctgggatacttgcattaactctaagcacattaataggcttttcaaggttatacttatatgtacattatccatcagatgtttttgcagcgatggttattgggcttttaataggtaatttagttattgcagcatttaataaaagagcattaagttctattttgagttaaaccaagttactattgattccgaaacccatatttaatgactttgaaaataatttcttattattagtaaattattattttgaaaattaaagatatacattataataattatgaggaagattattataaaagcaaattagtgaaaatgatattggagcttattacaaagggggaagaatgtgagttgggattgtgcggtatggcactgcaatattgtaaaaaataaagaggatgcagaaattctatataaacgactatgcgaaggagatacttcgttaattggtcctacacaaaaaatacaagatttttatgaagaattaacatctaagcatcctgaaattgatgatataagtgaagaggaaattggggatttagatttatgcccatggagtgtaacttttgataaatcagaaggacacattattatgtcttgtgtatttagcaaggctgatcatgtaagcgatttgataaaggaattagctcaaaaatatgaactatctttctatgaacctcaaaataaaaattttatttataattaaaagtacatagataataatctttgctgtttgtggttaaatgtggtaatatagaaaggtggttttttattataatttaaattctttactttaaattataatgggatatgagaaaaataaattggggagggatattaaatattatatggtcaaggtaaaatattctgctatatatactgataattttggctgtgagcaggcagaactatactttctaaaagggggacttcaatttaatataagagattgcgtcttttatgatgatcattttgatttcgatttttatactaagagacctaatgagcataaacaacttttctatttaaaggatgatgaattaatagaatatgttatggatgtgagaattccattaataatgacatatgatgatgaggaatgtgtgagagaatctatattattcattaagagacagagaaattcttataataatatgctttcacttgatctagatggaaaatcttatactgttgaaggatataatttgcaagaattattatataaaatgaagaaaaaactgcctaaagaatatactatggaatctgatttttcatgtatgctgggtgtatattctattgaagcaaataaagaagaagatttttattgttttagaaatttcgaagaagatgatgatgaaagtgtttctagcgaatctttttgtttggaatcttctgattttagaagtagagatgcttttgatggacttaaaaagtatccaattacttatatattcaatgaatattgtttaagtaagatttaatcagtcatatttatgtataataatataaaaaagagatggcgcatataagatgtgctatctctttttggttaataccacgattcataaaatcatgttcatataatagtataatccaaattttttaaaattataccaagagttaaaaattatattgcttgatttattttttcctttgattctattgttagtgaagaattcaattgtgtcattaaatttggatctagaatttgttctaattcctcagaagttagtatacctttagctagaacaagttcctttacggaaattcctgattttaatgattcttttgcaatgtcagcggaattttggtatccaatgtatgggcaaagtgctgttacaattccaacactattgtctaagagttctttacatcttacttcattagcagtaatacctataatacaattatcaactaaagttgtagtggcattttgaagcgtttctattgattcgaataatttatagaatagaacaggttcaaaagcattaagctctaattggcctgcttctgctgccatagttattgttaaatcattacctataatgttaaatgcgacttgtgagaccacttctaaaataacaggattaactttaccaggcataatagaagaaccattttgcattgaaggcaggttaatttctgcaaaacctgtttttggtccgctagatagaagccttaaatcatttgccattttagacaaattaactgcacatgtttttagaagtcctgatacacttacaaaacagtcaagattttgagtcgcatcaattaaatcatttgattgagttaaattgagaccgcaaatttttcttaaattaggagttatattatgaaaatattcagggcttacatttattgctgtaccaatagctgtgccccctatatttagaacaagcatatctttttcagccttttttaagcgttctatatcacgttttatcatcgatgcaaaagcattgaatgattgtccaagtctaattggaactgcatcttgaagttgagtacgtcccattttaattatattattaaattctagcgattttaatttaagagtattatataaacgttgaagctctgcaatagtttttggaagcatttttagaactgtaagttttccggctgtagggaatacatcattagtagattgggccatatttacgtgatcgtttgggtgtacaacattataactgcctttaatttctccaaggagttcaattgcacgattagctataacttcattagcattcatgttagcagaagttcctgcgcctccttgaattgaatctactataaattcttcatgtaattttccgcaaataatctcatcgcaagcatttattatagcattggcaatcgttgaagttaagaaatttgcatctctatttgtaatagcagcagctttttttatttcagcaagactaattataaattccttatttaattttctttcagtaataggaaaattgttttttgctcttaatgattgaatgccgtaatatgcactagctggtacctccatagttcctattgagtctgattccatacgtgttttcatttaaaaattcctcgctttcataacttaaatcatttcaaaaatttaaaataatagattacttaaaataatttctaacaacaaaagataaatttataatcaagatatatctaccgttattttttgttaatctctatgactgaagattatcacgctttaaaatcaatgtaaatattagaaacaaaattgtgaataaaagctaaaaattagcataatacacttaaataaaattatagtagatataaaaatgcttaattttattaagtctgaaatttcaaataaaatgcgaacataaatattaaattatatttataaattcgtaatattactaaaattatagataaagttttgcttaataataagaaaaatccataaagacaataaaatagtataaaaattgagaataaataaggaaaagtttggaatatatgagcagtataataatttatactaaaatataaagttaattttttaaatcaaaacctcaaaaagtacttgtaaatttctaataatcaccttaaaatataaatataataaataggcaatttgaataagtataaaggaagaatagattgctgaaaatttaataataaagcgcaaaggggcgtatcaataatcagaagctattaggattatttgatatgtttttttattctttaattttgctattataattaattcataaggagacagaggtatagtatatggacaagattgattttaagattattgaacttctacaagaaaatgctcgttatccactaaagcatttagcagaggaagtgtttttatcaactcccgcagtatcagcacgtattgaaaaattggaacaagcaggtgttatcacaggatattctgcacacgttgatccactaaagttaggatataatattaaggcgtttattaatttggaaatgacgcctaagcagaaacctgagttttatccttttatatcaaattgcccaaatgtacttgagtgcaattgcgtaacaggcaagtattccatgttaataaaggttgcttatcacacaactttagaattagatgcctttattggagaattacaaaagtttggaaatacggaaactcaaatagtgttctctacagcagttgaacatagaggaatagatgtgacatcagaaattggtgataaatagatttaagaaataaggctgttctagatataaacatggtttatatctagaacagtttttattattacaacataaaatatagaataatttttaggtctatatcatagaattgtaatagtataaatatatgtcaaggaaagtttctataagaaaataatttgggaattatatatatgtcgagttggagggaggaaatattgtgagtgaatatgaagaaaaattaaacgaaaataagaacataatattgagaaacattgagcaaggtaaaaaatcgggggtcaataaagtttcagccgtttttgccataagtaaaagagatgagcttcgaaaaaacatggttacagatttggctacatggttaattactgatggatataaagtttctcttaaagaaggagaactcgagatattaactattgaatgggaataaaacagaaatttgtacaaaccctccaaataagagggtttacatatatgctatataaaataacataaatatcaaagtcttaagcatctaaatttataggtgctttttgttatgtgtataaataatgctattttttcacaacaaaaagaattaaagcaaaaatattgttgttttatagtcagatttgtgcgtttagagtaaaaagcatttttaaagtttgaatgttgtgataacatttacagtataagaagtgaaatacttataaaattaacacttaatttaaattttttcttcagaatttgctatacaaattttaccaacttaattgtattctatagaatattagaggggatgagaatggatggggaatataattaaaataaacatatattatgcagaatttacaagaaaaaataaaggcaaattaagattggaaacagtagaaaaatccattttgaggtatgataaatggttaaaggatacgaatagaaaagataatatagaaacttatgaggaatttttacgggttcagtaatattgacgggggatagtaagtgatattaatattacttactatcctttagagtttatagtattagtttgtttattatatttggttggcatggtggaaaacaaaatatatagacataagtataagaaattttcataaatatattaatgtggatacatatatagataaatcagctataatctagacttatgcgtgtgtatcgccgaaatgaataatatacttaaatttaaacactacaagttgtgtttaagtaaaatgaaaagataatttaaagagctagaacaaggaaatttaatatagcctttataaaattaataatctaaataagggagaggttttaaatggttaaagatgaatttaaaggtttagtaaaagagtataatgatgaaagttgctcatggtgcaaaagcgaatcgaactgcttttataaaagaaaggcaatggaggctactagagaagctataaaagaaatcatcatctgtacatcagcttattgcactgcaaaggtttcttgcgattattatagaagggacagcgagaaatacaatctttataatgttaaagaagcttaggaataattgataattttatgaaaggtgctactttttattgtggcgccttttttatttaaaaaagttaaatactcaattaaggctggaatatagaacttcaatttgaatgtatatctttatttgaaattagctacaacctgctgcttagaaccttcagcgatatttttatagcttttcggaacaaaatatttatgatttcggcgagttatatgcataagttcaggtcttagtcgggttatctataagagtactagaaagaatataaatgcttttgctaaataaattagcaaaaaatatatgccagatacgaatataattaaatattgctcatatacatctatattgtctggtaatattataggactaatatatggatgcgttatggagggcaatatgaaattcgactataatttattaattttactgctgattaatttctttttgttattcatagttataggtgtaatatttaatgtagttagaggttataaggcacatgtagacaggaataaaaaaattgaacagaaatttgatgagatattgaatgagtttataataaaaacattaaataatagtaaataaagcgttaatacaagaatatttctgctttaggcgaaaatataaatgaataacatgtaagtaaatccactaagtacttaaagacatacagtaatattaactaatacaagctatcaatactatttttgttaatatttttatagattatattttgtgttattggttaatatattactgccaaacaaaattaaaataaaaggaggtagattcaaatggcatcaaataatagtggaaacaatagaacattagtacctgaagcaaagcaaggtttaaacagattaaaaactgaggttgcatcagaaattggattacaaaactatgaaaacatcgataaagggaacctatcttcaaggcaaaatggtagcgttggtggagaaatggtaaaaagaatgatagaaagctacgaacaagggttataaaaaataattatacaaaagagcactcatagaattatgagtgctttttaatataagaatgtatattagtttatatgttaaaaacagttaataacatatattgctacaatgaacatatgtctaatgttctaataaactaggattaattaaggaaaaatgtataaactaaattagggtatatcacattctttataaattaaacaatatgaaccatgaaatatgatataattaatattagaaaaaaatattataaaaaatatggagggactataatgaaaataaatgatagagttgaatttctagaaaatgataataaaggtaagacagggactgtaattaaattgatgggagaacatagcgctgttgttgtaatagatggagaagaagatgatgttccaactttagcaagagtgacgaatttaaaggtgatttaatctaatatttaaatttacatatattaatatatacataattttattatatgttacgtataaaatctaaaaataatttcctcttttttatataattggttatatatttcttttgattatatataattaattatatataaaggagggagacttatgttagacggtaaaaaagagatattaacaatgtttaaaaataaaaatgatgggttgacatttgaagaaatacacaccaatgaaaaatttcagccagaggtatattttaaaaatggaaccctaactaaaataaatattttcttagttggagccttaaatcaaatggtgaatagtgacatacttgtttggagacaaggaaagtattacttaaaagaaaacgatataggttaattttctagtgaagaataagcgaagaaaatgccactatacacaattttctttgcttatttaaggctatctttgaatatcaagcttctcctagaattttgtatatctggaatatttaatccatcatgtcctttttctggctcatagcgtaagattatttcaatattattaaagttatcaatattattcatgcgttccatgcgtttcaataatggtactatctgggttgaactgtctgtgtgagagcataaattggcatgtgtatataacttaggcacataattgttcttttcaaaagcatctactacgttaaatcgatctttgtattttagaaaaggtttatcatcattaaagcaaagagttgcaacagtttcaaatgcttccttttatattccaagttataaacaataattttttcattagttcaccttcttattagattatatgttaaggtaacagaatttagctttcctactaatatatgaaaagcaacatagttttctgaactgcataattaagttaacttatttttgatttttcagacaaaataaagtataattaaatgtatattaaaaaggagggcgaaatttgtggaattgtttgaggtaggtaaaccatttaaggatggtattacaaggtatccagaaggaataagtttcgatataaataaaaatgggtgcaatttattaatttatactacgaaatttacagaaaaatctagacaagctattataaagggtgatctgaaatacggatatttcaaagaagataatgttattatcatgttattcaggtttggtaatcaccaatggatagaagttccgtattctatacatatgtgtaaaaattccgttgaattagaagaagttacagaaactgagggcttctctcttaatatatatattattaattcggggacaggagttttagaagatactagacaagttgaacttgatattagattatctaaaatgttaagagatgatgtcttagaacagaaaagtatgccatatagtggatttaatattagagtaagtgaatttaatagaaaatattcaactaaagcattagttagcatgtctagagcattagtttaaaatcattttgggtatgtataattaactgatacttaaaattaagatatttttagtaagaaaaattttgagatatgtatatgatgcaataataaatttatatttaaaaccctggtaagttacgtgttaaattaaaaactagaatgtagaaatttaattgcaacatatacatacgtaaatattaaattatagaacggataagtaagtataatattactttcataagctaattgctattcataagtctaatccctagattttagatattgaaataataattcttaatttatataattttagtaacagaaaggggtggaagctatgaaggttgagttttgtcttgtagaaagtgatgatattgtttttacaaaagaatctaaagatttgaaagatataataaatgtcattaccaaagtaggtacagagatcaatttgttttttagcaaagatgatttcatccatgggtacgtacaaaatgtagcatatcaagttaatgcggaaagtaatgatgagagtctaataatatatttttcaaatgattataaaaaatctaagaacacagagagaatatcagctgaacatttaagtactacgaaattaagtgctaaaaataatgataaggcataatcgaaaaaataataagtccatctgctaagaccatttcctattattatgcgtcagcagattgtcatagtaattttgctattagattaatatacctacgtgtaaaagaatgataagactggtatcttacacttgttattttcattcatatgcctaaataaaaattaaggtgagatagtaaattttataattgtatttactatctcaccttaatttttttgttaaattataaaaaagtaattaaatatatatgcaacaattggatttttgtgttgagttcttaattgaagtgatctgcatgctagagtattaagcataaatttattattgcaatataattgaaatagccattatttataggtttaagttatttgtaaataatatattttaggatttaatatatacatattttataaatgttgccttgtgtgctataatttatatgaatttttatttataaattgtaatttttgtgaagtatattgaaaatagtgaaggttacaagtaaaagcgggtgaactttgtgatacatataggctaaatatgaaagaaattatatatgaataaaattaaatttgtaactataaaaaataaagtttaagatacatttatgctttatattataaggagatatattatgaaagaaaaaaagaatagaaaaagatttaataatagcaggagaagtaattctataaaattagttaaaatagtatcacttttagttgtaattggaataattgcttttattgggattaataaaggaataaattcttttgctaatatggctactagtcaaaatagtgataaaaaagatgttatcgaaaacccatcagaggatgagaaaaaagagtttggggaagttccgttaataaatgataatagaggcgtgccggtaatttgttttcattctataaatgatgatccttcagtaaaaagccctattattatttcaaaggataaatttagaacacagcttcaagctattaaagataatggatatacgacattaacaatggctcaacttaatgattacctttctaaggacaaggctattccagaaaaaagtgttgttctaacctttgatgatggatatagagataattacactaatgtatttccaatattaaaagagtttaatatgaatgcaacgatttttgttatacaaagttatttagatagagatggatatctaactactgaccaagttaaagagttgagtagtagtggaataattgatatagagtctcacacagtttctcatattgatcttccgactatgtcatatgaagaacaattaaaagaactaaaaaattctaaggaaaatttagaaagtttaattaataagcctataatttcgattgcttatccagaaggaaaatataatgatgatactaagaaagcttttagtgaagttggttattcaatgggatttactactgaaagaggatacgctgacagagatgataattctgcagagctaaatagaatatgtgtagattatacatataagcctaaagacattctaaaggtattaaagaacttaaagaagtaatgtgaaattttcttttaagtaatatttagaaaaatccgaacgaaaagaaaaaatatttacaaaacgttctcttaaaattgacaaaatataatataaattatagaataaagagagcaataaagatgcttattgtatattatccaattcaattagaattggataatatttttaataaggatcttaaaaataacttatgaatggagtagataagcatgaaagcaatattaacagtaattgggcaggacaaagttggtattatagcaggggttagtcagaaaatgttagaatatagtatcaatatattagatgttaatcaaactataatgcaaggtttttttaccatgataatggtattagactgcaaagatatgaatgcgacttttgaggaagttcgtgcaggacttacagcagagggtgaaagacttggggtagaagtaaagattcaaagagaagaaatatttaagtcaatgcattcactataataggaggggcttatgaatactaataatatacttgaaacgataaaaatgattgaggaagaaaaacttgatgttagaactataacaatgggaatatccttgcttgattgtatagatccagatggagataaagctagaattaagatatatgataaaattacaaaatctgcagagcatttagtagaggttggaaggcaaatagaaacagaatttggtattccaatagtaaataaaagagtttcaataactcctatgtcaataattgctggagctactaatgaaactagctatgttgaatttgcaagaactttagatagagcagcagagactcttggaatagatttcttaggaggattttcagcattagttcaaaaaggctgtacaaaaggtgataagattttaataagttcaattccagaagctttagcagtaacaaaaaaagtttgtgcgtcagttaatgtagggtgtacaaaatcaggaataaacatgaacgctgtaagagatatggcagatgttataaagagaactgcagaacttacaaaagatcaaaaaggttttggctgcgctaagttagttgtatttgcaaatgcagtagaagataatccttttatggcaggagctttccacggagttggagaagccgagagaattataaatgttggcgtaagcggaccaggagttgttaagagagcacttgagaaagtaagaggagcatcttttgatgttgttgctgaaacaattaagcaaactgcatttaaagttacaaggatgggagaattagttgctaatgaggcttctagaagattagatgtaccttttggtatagttgacttatctttagctccaacaccagccgttggtgactcggttgcagaaattctagaagaaataggattagaacaagttggaactcatggtacaattgcagcacttgctatgcttaacgatgcagttaaaaaaggtggagttatggcatgtagccatgttggaggtttaagtggagctttcattccagtatctgaagatgcaggtatgattgatgctgtcataagtggatcattaaatttagagaaattagaaggaatgacatgtgtatgctcagttggccttgatatgattgcaattcctggagatactccagcatctacaattgcaggaatgatagctgatgaagctgcgattggagtaataaataataagactacagcggttagaattataccagcaccaggttgtgaaatcggtgatatggtggagttcggtggattattgggtagagcacctgtaatgaaggtaaatggtaaatcgtcagaattatttgctcaaagaggtggaagaattcctgcacctatacattcattcaaaaattaataagcataaaaataagacctacaagatattaattatctttaggtcttatttcatattccatattatttctaaaataagcaattatagaaatcttttcttttgtaatatcgaggtgtaaaaatagccttacaggataaaattagttagttgttttataataagaataatagtggccataatgcccaagcattattaaaaccatatccaccaccatatccgccataaccaccgtatccacaaaagtttccgtaattgtatccacagcaattattgcaacatctgttataacagcatctgctcatagttcatttctcctttgttaatctatatcatttgttatattaataatatattaaacataattaaaaattgttacatattaaacttaaaaataaaattatatataaggatataacctgccatatttttattatacaaatttatgtaaataagatcttataggtgtacatactgaggtagaatagtttaaataaagcattttaatactagaataattgaaaataatgtttaaaaagacatgaaattaataaataacataatacggatttagaatttggtttctttatgttataataggcaaagagaaaataaggtgtgtatgattttttaaaattaaaccataagaagaataagtaggtgaagatatgacaactgaaagaaagtttttgcccataagcaaaaaagatatgagagaaagaggttgggagcaattagatttcataattgttacagctgatgcatacattgatcatcatagttttggtactgcaattatttcgagagtacttgaagcaaatggatataaagttgggataataccacaaccagattgggataatatttatgattttcagagatttgggaagcctaaatatgctttcctagttaatggtggaaacatggatcctatggtcaatcattatactgtaagtaaaagattaagagaaaaagatttttattctccaggtggacaaatgggacttaggcctgatagagcaacaattgtttattgcaataagataagagaagcttataaagatatagatattgtaataggaggaatagaagcaagtcttagaagatttgctcattacgattattggagtgataaagtaagaaaatcaatattaattgatagtacagctgacttgttaatttatggtatgggtgaaaaacaaatagtggccgttgcagaaagtttaaagaataaagttcgagcaaaggatataacttatattagaggcacttgctatgctacagaaagtttagaagatgtgcaggattatattgaaattccttcgtataaggaagtatctacaaatagatataaatatgcggaagcaagcaaaatagaatatgaagaacaggattcggttcgaggtcatattatcgtgcaaaagcatggaagtaaatatgtggtacaaaatattccagaagcccctttaaatagagaggaattagatgaagtatatggacttccatatatgagagattaccatcctgtttatgaagggaaaggcggaatagctgcaattgaagaagttaaatttagtacagtaagttcaagaggctgttttggagattgtaaattttgtgctataacttttcatcaaggaagagttgttcaaagtagaagtaaagaatcaatattacaagaagttgaagatattacaaaacttccggattttaagggatatattcatgatgtaggaggaccgactgcaaactttagaaaaccagcttgttctaagcagttagcttttggagcatgtaaaaataaagagtgtttatctccagatgtttgtagaaatatggatgtagatcatactgaataccttgatttgttaagatctataaggaaagtgccaaaggtcaaaaaggcattcgtgcgctcaggtcttaggtatgattatattatggctgataaagatgatacgttttttaaagaattagtagaacatcatgtaagtggaaaattaaaagttgcacctgaacatatttcaaaagatgtactaaaatatatgggtaaaccggctggtgagacttatgataaatttgtaaataagtttgaaaaaataacaaagaaacttggaaaaaaacaatatataattccatatttaatgtcatctcatccgggaagcactttagaatgtgcaattgagcttgctgagtatctaagagatattaactatcaaccagagcaggtacaagatttttatccaacaccaggtacattggctacaacaatgtattataccggattagacccaatgacaatgaaagaagtttatgtaccaaaaactaagcatgaaaaagctatgcaaagggctctgcttcaatataagaatccaaagtattatacactagtatatgaagcattaactcaagctggtagaactgatttgataggaaatggtccgaaatgtcttataaaagacaaaaataaaagtgtcaaaggttataattctagcgtttccagaggtaatgaaagccaaggaattaataagaaaaaggcttcagacagattaaagggcgatagaatttctgatagaagagaaaaaggtaagaaaacaaaagaaaaaaactcgccaaatggcaaaaagaagactattaagaaaagataaaatagtaaatagcattgtaaaattgctgcaatgaaataataaaatgtttttgtcagatcttatatttagttcatgagttgtagcaatttactaatttaatcgatagtatatattgaaattaagaataagttattaatttttcagcatgtatttgcatacatgctgaagttaaatttctacgctttaatcctaatttggtagttacgtattagagtgctagatgtggaattttattatttcggtataattaagagaaaggggtaaaaatgggggatattttaataaaagcgtttagctttatattgattattgcgataggatatggtttcaaaaggataggggtttttgggcccaaagactataaaattataactaaaattataatgaatattactttaccgtgtgcacttattactggatttgcaaattttaaaatggatacatcaatgctttttattattttgcttggatttttgggaaacattataatgtcttttgttggctttgttttagctaggaataaggataataaagaaaaagcctttaatatgttaaatttagctggatacaatataggatgttttacactcccatatgtgcagagttttatgggagcatatgctgttgggataacaagtctctttgatataggcaattcgattatgtgtacaggaggcacatatgcacttgcatcaggtgttgttggggaagaaaatgatcaaagcattagagcatttcttagaaaaatgttctcatctgtaccttttgatacttatatgcttatgtttatagtgacaattacaggtattaagttgccgcaggtggtatatacaataacttcaaatctaagtgcaggaaatgcatttttgtccatgcttatgattggcatggtttttgaatgcaaattccacaaggagcagttagttaaagttgcttctattataagtatacgttacttgtttgcagcaatatttgcagttattatttatttttgtgtaccattttcaatggaaattaagcatgtactagttattttggtatttggcccagttcctgttcttgcaccagtctttacggctagatgtaaatgtgatgaaggcttagctggggtggtaaattctttatgcatacctataagcatagttataataactttattgttgtttatcattaattagtataatcgaaaaagtagtattttgataaatagattaaaccactaggcataaaaagcgtgtggtttttttgttgtgttaataaattatttaataaaataatacgtgtgttctaataataaatttatatttaaaaatctagagatcaaagtatccaattaaatctaatagaaagtagaaagataattgtgatatatatagataatatttctaaaatattatataataataattattatttaaggttttaaggaggagatgaaattgaaaaaactaatctcatggaatgtaaatgggttaagagcctgcgtaaaaaaaggctttttagaatattttaaggaaatagatgctgatatattttgcatacaggaaagtaagcttcaagaaggtcaaatagatttggaactagatggatatacaagttactggaattatgctgaaaagaaaggttattcaggcactgctgtatttacaaaagaggagcctttaactgtaaaaagaggtattggaatagaagaacatgataacgaaggaagggtacttactttagagtatggtaatttttacttagtaaatgtttatactcctaattctaagcaaggattagaaagacttgattatagaatggtatgggaagatgtgtttagaaaatatttaaaagaacttgagaaaaacaaacctgtaataatttgtggggatttaaatgttgcacataaagaaatagatttaaaaaatcctacatctaatagaaagaatgcaggatttacagatgaggaaagatctaagataagtgaactattagaagcagggtttatagatacatatagatatttctatcctgacaaagaaggcatgtattcatggtggtcatatagatttaatgcaagagctaataatgctggatggagaatagattatttcttagtttcagaaagtcttaaggataaattagaagatgcaaaaattcatatggaagtaacaggatcggatcattgtccagttgagttgacaattaatctataatagataaaaaacaaagcataacaactatatttgagtagttggttatgctttgtttttttactcattgtacaataaatctttttatgcctatccaagcagtaaagctggaaatgaaagatagtataccaaatgttagtatcaagaaaagcggaagtgatataggaaaaaagaaaatatgaattcctaatattagtgcacaggctaattcgcctaacaatgtatttcttatacacacaatacaaagtaatatagaatttttaaaaacatcttttagaggaagagaaacagtagtaagcaacggataaatatacatggatgcaagtgcaagtaaaactgtgataaaaagacataaatagaaaacaaaatagaaaatagatttctcttgagctaattttaaataaaaggatagtgaaacacctaaaaatgaaaatgcaattaatattattaatccactaaataatgattgtttccagttgtttttaaaggcttcatggaaatctgaaaaaatataagtatgctttctttggatcatagacattaaaattgaagtcatagcaccgaaagctggaccgattgtaataatagggagggaatataaaacaaagacaaaattcaatttaattatatcccaaaatctcatagtaaataattcaaaaaataaatgtataccttcctttggaggctcgtccttttctataccaggaccttcacgttcgaaatttggggttaatagtttcatattaatcaatctcctcaaataaaatttacctaatattattgatatatttattttagataagtttaaagatagtatatcatttgaaaatttaaagttcaagattataaaaacatttacatgccattaagaagtccattataatataaaacatcttaagttttgtataaaaaggtcaaaatatgatttaaataaatctaaaataatttaaataaatataacttgaaagtattgactttaatagatataagtatataataaatttatgataataagttgcaacttaaaaataatgcatatgaaaaggattactagtggcaaaatatcgataaattaacaaaaggattaaataaactaaaaaaatatatacataaaataatttagaaggaatacaaatttattgatatactttaaaattaattaaaataaagcgcgtatttgtacaagctttgtttataaaagttattttgatcactgtttttaaaggcatatatttaattaacaaaaatgaaatggtgttcactaaatatattaacttcaaataaataatgggaggtaaaaatatgaaaagtgtaaaaatattaaaaaaacttgctgctattgctgctgtaacatccattgctgcaacaatgttaatcggatgtggtggaagtagttcgagtactagctcgagtggaggaaaggattcagcatcatcttcttcaggagatcagttagaaatgtggacatttattgagatgcataaaacgttttatgaaaagatgttagaaaaatggaatcagaaaaaccctgataagaagttaaatattaattttacagttcttccttatgatgatatgcataataaattgcaatctgcactcttgtccggacaaggagcccctgatgcatgtgatatagaagttggcaaattccctaattttcttaaaggagacccacaattagagaatcttgatgatgttatttcaccttataaagataagttggttaaatctcgtatagatctttacagtaaagatggacataattacggactaccaacacacgttggtgcatgtgtagcatactacaatactgaaatcttagaaaaggcggggattgattataaatctatagctacctgggatgattttaaagcagcaggtgctaaatattatgctgcaactggtaaaaactttggtactgctgatacaagtgctcaatggcaagaaagtcttatgctagcagaacaaaaatcagattttactgatgcggatggtaagccacaattaaatagtccgcaaatggttaaagcacttactacgttaagagatttacaagatgcccatgcaatagctactattccgggtggacaacctgaccaaacagatgctgaaggtgcgataaataatggggactatgcagttgcaattatgcctctttggtatatgtcaagatttttacaatacatgcctgatcaagcaggtaaatgggcaattgctccggctccagtatttgaaaaaggtcaaccacgttctgtaggtttaggtggtacaggtacagctgtaactaaaacagctaagaataaagaaaatcttaaagaattcttagcatatgcaaaactttcagatgaaggtgaacaggcaatatgggaagatttaggcttcgatccatgcaatactgatttatggactaaaaatgatattactcataatccagaaaataagtttgtaaaatactttaagactaatccttttgatacattaaacgaaatcaaaaatgaaatacaattaattaaatcaaatgatgctattccaagtataaacaacgttttaaatacagttacattaaatagcatatttgaagataaaaaagatataaaacaagcattagatgaagcacagcaacaagtagaaaatgaattgaaataattaaaaacatccacacagagaagctttttacaagcatattgagttacaaagatggcttctctgtattatttaagcgtgggaggaggaagttaagaaatggtaaagagatttatatataataaaaaagcagcaccatatgtatttatattaccatttattcttgtatttttactttttttcatatctccaatggtaaatacggtaataatgagctttgagaatgtattaccaggatcgagaaaatttgttgggtttgaaaattatacaaaactattaggggataaggttttcttagttgcgttatggaacagctttaaatatatgatatggacattgatattgcttattccaattccaatgatacttgcatgtataatagacagcaaactaatggttggaaaagaattctttaaatctgcattatatttaccggctttaacatctgttgctgtggcaggtataatatttagatttgcctttggagaacaatctacttcattaatgaatcaggttgttgcgctatttggaatggatccatttaaatggctaaaaaatggaactacaggatttatagtattgctagtattggcatgttggagatggactggtgttaatatgttatatttcttatcaggacttaaaaacattcctgcggaattatatgaatcagctgatatagatggagcaaatacattgcaaaagtttagatatataacaatacctcaacttaaaccgacaacaatttatgtgcttactatatctatttacgcaggtcttgcaatgtttatagaaagttatatggtgtttaatggtaataactcgcctaataatataggtcttacaattgtaggatatttatacagacaaggtattgaaaaaaatgccatgggttatgcatctgctgtaggattagtattgtttattataggaatggctattaatttagtgcaattaaaactaaatggaacatttaagaaaggagattagtatgcaaagcaatattagtttgaataataaaaaaaatacgcaaaaaaatgcagtaagtcatgtaaaaaatttgccaaaaagaatattaatttttatgctttttgcagtcatagccgtaatattactaattcccttttatacattatttgtttctacgttcaaggatggtgcattagtaatagcaaatggtatggatgtatcaatagatactgctaaaatgtcgtttaaaaattatataattctattcacagaaaaaaatagcttatttacatggttttttaatagtttatttttaactatagtgcaagtagtttgccaattatttatcagcgcatttgttgcatatggtttcgcaatgtacgattttaaaggaaagaattttctatttatatgtgttttattcgttatgatggtaccttttgagattttaatgttacctttatataaccaaataagtgatatgcatttaacaaatacctatattggaataattttgccgactatagcaagtgcatcaactatatttttctttaggcaatacctctccggaataccaagagaccttgttgaggcaggtaggatagatggagcatcggaatatggtattttcttcagattaattttaccgattatgaagccatcttttgcggcaatggctatattaaatgcaatgtttagttggaataacttattatggccaatgttagtgttgaaagatggtgcaaaatttactttaccaataggattaaatacattattaacgccttatggaaacaactataatttattatttgtaggttctttcatttcagtaataccagtatttattttatttgcatgcttccaaaaatattttgtagaaggtatgacagctggagctgtaaagggttaatatgatttgattttcactaaggactagaaagtccaaactaaatacttaaggagatgaattataatggcaaaaaaagcaaaaatggtggtagacaaagactttaaaatatccgaaatagataaaagaatttatggttctttcattgaacatttaggaagggcagtatatggagggatttatcagccaggccatatgtcagctgatgaaaatggctttcgcaccgatgtaatggaattagtaaaagaattagatgttccaattataagatacccaggtggtaattttgtatcaaatttcttttgggaagatagtgttggagaagtagcagaaaggccaaagagactagaattagcttggagaagcttagaaactaatgaaattggattaaacgaattctcaaagtggactaatgctgtaggatctgaaataatgatggcaataaatcttggaacaagaggaattgcagatgcctgcaatcttttagaatattgtaatcataaaggtggtacgaaatatagtgatttaagaataaaacatggtgttaaagaaccacataaaataaaaacatggtgtttaggaaatgaaatggatggaccatggcagataggacataaaacttctaaagagtatggaagattagctctagaaacaggtaaagctatgaaattaatagatccagatattgaattagtttcatgcggaagttcaaatacagcaatgcctactttccctgaatgggaagcatcaactcttgatcatacttacgatgttgtagattttgtatctcttcatcaatattatggtaatagattaaatgatactgcaaacttcttagcacaaagtgatgatatggagcactttattaaaacagttacttcaacttgtgattatataaaagcaaaaaaacgtagtaaaaagactatgcacttaagcttcgatgagtggaatgtatggttccattctaataatgaagatgatgatataatgaagaatcatccatggcaaaaggcacctgcacttttagaagatatgtataattttgaagatgcacttttagttggattaatgttaattgttttaatgaaacattctgatagagttaaaatggcatgcttagcgcaattggttaatgttatcgcaccaattatgacagaagaaaatggaccagcttggaagcagactatatactatccatatttgcatgcatctaaatacggtagaggaattgcacttcaaccagtagtttcttcgccaaaacatgatactatagattttactgacgtaaaagacgttgaatcgatagcagtatataatgaagaaaaggaagaagttacaatatttgcagttaatcgtaatttagaggaagatattgaattaacttgtgatgtaagaagttttgaaggacttaaaatcatcgaacatattgcgttagagcatgataatatgaaaatagtgaattctccaaaaggtgaagctgttactccaaaatctgtagatagaagcaatctggttgacggaattataacttcatctttgggaaaagcgtcttggaatgtaattcgtttaggaaagaataaataaaataagaagtgatatttatgccttataaatatcacttcttatttattataaaaacagatataattcaatatactttaatatatataattagatacaatgagcaacatcaagattcttgagttaatgtattataaacaagtcttacgcttatgccttgattgtaattgccaaagttttttccgaaaatagttaatccaccaacatgttttgtttcttctggaacagctaactttaaaagaatatcacttttataagttaactctaaatcttctagagtgacatctgaaatctttattccatcaataaaagttccgaaggaatttatggttaaaagttttaataatccgtattgattccaatgaggattccaccaagatggagtcaaaatacctttactatcaccaaaatctccaggactggtccatctaccaacattgacattatttaaatagaaatgtatatcagatggccatatgctgcatactccaggggcttctgaacttatttccatagatatttgcaattcagagaatacttcacttggttttaaatagttaggaatcctatattctatacttcctttagtgaaccaaagaatatctgcattaattctttcaggatcagcaaagtaatttggattgtctacttctcctataatactatccttggttgcgatgccgcatgtaggggtaatatcataatttgaatagtgacctatatttaaatctatatgatatgaattttctacatcttgtttgccaatatcaattacaaatttatcctcgtgaagagaacatatcttttgcaatccatgctttccagttaaattagtcgtttttattaatccacactcttctaatttttttatatgcatagtaactgcgccattagttaaatcaagtttctctgataactcattcatatttaattgcttatactgtgataaaatctctaatatattcattcttacatccgaacttaaagctttgaaaagtggcaaactttcctttagatttgtaatgtgaatcataataatctcctctgtgttgttaatattcgttgaattgaaattaatgttgaagtattaatttcagaaaaattgtacttaagttatagttcgttataaaattatcaaataataatacactatgttaagattattatacccttttatggattagatgtgaataatcattttaaatatttttaaaataaagtcataatataaacaattattttttgtttaagttttttctaaaatatgcgtttttatattcagttggtgtgacatcttcaaattttttaaaaagtttcataaaatgcttatcatcattaaatccaacctgaagagcaatttcttttattgagaaagatgaatttaatagaagttgtttagaagcataaattcttgttttgttgatgtattttaaaagagacgtaccagtatattttttaaatgccgaagaaatataatcctgattgtagttaaatgtttcggcgattttatgtgcagttaaatttgaattataatttatatttatccagtttgcaatttcatttattttgcaattggtattagatagtttttcattttgatgaattatattatccatgaaatcttgagaaatttccattgccaacaggcttaatgcataatttgttaaatattctgaataactctttttgtttgatagatcaagtagttgacgaaaaataaggcttgttcttgcggcagaagaaattgaaccatattcaggtaaaatataaacatctgaagaggctttttttaattcattatcaagattgaatatataatcattaatttgttcagcgtttaaaagcttatattcagcagaagtaattctaaaatgacaccaatagtaagaaagattcccttcagattttttataaccgtagtgagtatggaagggaaataatataataaacttatttggagtaagttcatatcttttatcatcttgtgcaatgtatagtgttcccttacaaccaattagaataacaaaagtatcgaggtttcttttagaatgtataaaattttcattatttatcaattttccactagaacaatgagtaaggggatatttgttatcagagataaaataaaacatataggatttcaccacctattatactaaaatgaaagttgtttctatataataaatatactatagttatatgtataaaagctagtcatatgcttaaataatggcatttgtattttagaggaatgaataaaatagtttttgataattataataaattaaccaccataaaaataaatttaggaggaattaataatgaactcaaatacctttggtaaacctttgcaaataaatcgtataaatgtaaaagataatttttggaagaaaatgatggagctagcaagaactcatgtgattccttatcaatgggaagcattgaatgatagaatagaaggtgcggagccaagttattgtatgcaaaattttaagattgcagctgggatgatggaaggtgaatttaaaggttttgtatttcaagatagtgattttgcaaaatggatagaagccgttggatattctcttatgtggaataaggatgaaggacttgaaaaaattgcagatggagcaattgatattgtttgtgcggcacagcagccagatggatacctagatacttattacattataaacggattagataaaagatggacaaacttacgtgataatcatgaattgtattgtttaggtcatttgattgaaggggcagtagcttattatgaggcaacgggaaaagataagttattaaatgcaatcgtaaaatatgtagactatgtggatactatatttggaccagaagatggcaaattgcatggatatccaggtcatgaagtaattgaattggctttaattaaactgtacaaaataaaaaaagataaaaaatatctaaatttagcaaaatactttatagatgaaagaggcaaatcaccattatattttgaagaagaggggaaaaagtacaataataagttctggtgggaagatagttactttaaatatcaatattatcaagcaggtaaaccagtaaaagagcaggaagttgcagaagggcatgctgtaagagctgtatatttatattcaggaatggctgatgtagcaagagaaacaaatgacgatgagctgctagaagcttgcaagagattatggagtaatatgactaaaaagcaaatgtatataacaggtggaatcggatcatcacaatatggagaagcatttacttgtgattatgatttgcctaatgatactatttatgctgaaacttgtgcgtctattggattagttttttttgcaagaagaatgcttgaaattgaacctaaatcacaatatgcagatataatggagaaagccttatacaacggaattataagcggaatgtcaattgatggaactaagtttttctatgtaaatccattagaggtagttccagaggcttctgaaaaagatcatttgagagcacatgtaaaagttgaacgtcaaaaatggtttgggtgtgcatgctgtccgccaaatctagcaagacttttgacttctataggaagttatgcatatacattaagagatgatacaatatttatgcatttatacatgggaggagaaatatcagctaatttctctggaaagagtgtagcatttgacattaaaacaaactatccatgggatgagagtatagatattaatttaaacatgaatgaagaagctgaatttgaatttgcattaagaattcctgaatggtgtagaaattatgaaataaaagttaatgaagaaaagataaatttcagtataatcgatgggtatgcgtatataaatagaaaatggaaagatgctgataaaattaacattttatttaagatgcctgtagaaatagttagagcaaatataaatgtaagggaagacatgggaaaagttgctgtaatgaggggaccagttgtttattgcctagaggaagaagacaatggacctgatctgcacagagtttatttaaatagtaatcctaaatttacttatgaatatgacaaagattttctaggtggagcaataattattgaaagtgatggactagtagttaaagagcaagattgtgataaagataagttatatgtatatgactataaaattgaatttaataaaaagaagttaaaatggattccatattatttatgggctaacagaacaccaggagaaatgatagtgtgggtaagaaaatgtatttagttcaataaagcttaaaattaagtaacttgtacgctgtttatgcagatgaatatagtatataattttaaatgaacctaaagcaaaaagcataaacgtaggaggtacttaattttgaatgaaattttgactaaaacaatagaagaaatggcggatatggaatttgactgtggctgcggcaaaaaacatagaatagacataaaacatatctatgttggagaaaatgtatataatagaattctagatgtcgcaaaagaaattttaccaaaagaaatcttattggtcagtgataataatacttataaagcacttggcaagtgtgtagaaaatgaacttactgaatcaggttataaggtaaataatattatattagttagtgatggagatttaattccagatgaaaaagcaattggacgattattggttgaagtaaataatgaaacagagcttatagttgctgtgggatctggaagtattaatgatatatgtagaataataagtgcaaaaactcatattccttatgttataatgggaacagctccatcaatggatggatatgcatcaacagtatcacctctaattattgatggagcaaaggtaacatatccagggactaatccatatgctattatagctgattcaaatattatgaaagatgctccatttgagatgatatgcgctggatttggtgatatactaggaaaatatacagcactttctgattggagactatctaatacgattcttgacgaatatttttgtgatacaacagaaaagctagtaaggaatgctatgtataaatgttttgaaaatatagaaggagctgttaagagagatgttaaagcaatagaatatatatcagaagcacttatactatcaggaatagcaatgactctttctggaaattcaagaccggcatcaggagcagaacaccatctttctcattattgggaaattgataagctttcaagaaaactagagcatcctttacatggcaattcagttggagttggcacagtaatatcagcatggttgtataaaaaacttaatattgaagaaaggtttgggatagagactcctgtgccagaaataataataaatttattaaattctattggagctaagtctaatccaaaggcgttagggattgagaaagaattatttcataggagtgtaattcatgctcttgaaatcagacctagatatacgattttgcaatatgcaaaaactgaaaatatgttagaagaatatgcaaatgaattaacgaatttattttacggagaatgatgatatgctaaaagataaaaaattatttttattagatattgatggtacaatagctttagatacaacattaatcgatggtacattagaatttatggattatgttttaagtataggtggtaaatatatatttataacaaataattcaacaaaaagtatagaagattatattatgaagtttgatgactttggaattaaagttgataaaacaagttttgtaacatcatcttatgcaaccgcaatatatctaaaagaagtatataaagataaaaaaatatttgttcttggaacaaaatcatttattaaagaactaaaaagatttgagcttaatattacagaagataaagatgaagatattgtttgtgcagtagtaggctttgacaatgaattaaattataaaaagatagaggatatatgtgaattactatcaacaagagatattgattatatagctactaatccagatcttgtttgtccgactagctttggttttgtgccagactgtggatcaatatgcgaaatgattgaaaatgcagttaaaaaacaacctttatacattgggaagcctaataaaacgatagtggaaatgtgtctagaacaaactggatttacaaaggagcaaactttagttataggagatagattgtatacagacattgcctgcggtattaatggtggtgttgatacagctgtagtatttactggagaagcaacaaaggaagatttgaaagatacagaatttagaccaacatatagctttagtacaatcaaagagttatatgaaaagttagctttttaatatacttttagtaaagcaaggattacaagctgttaagaatgaaattcaaattttgtttttagcagcttttttataatattatgaggaataatattatacgaattgaaattgtatattcatatttaaatttctagtgaggcaagcgttaaaataaatctataatttatataaagttagttgaaaaatatttttaaatgaaatttttaaatgaaatcttaattcattatttgatgaaaaatatataccatataataaaagtagatatactgtagataataacattccatgatagttttggacttattattttatatgattaattaattatatacaatttgtttagaataattattagaagaatataattttcatatcgctaagataatgagtttgatataatatttttataacataactagataggaggagattataggatatgaatttagaatatattatgaataagttgaaagatgagaaaccatatattaatggctggaaaagaatgagaaggtcagctataattattccactagttgagattgataatgaagtacatgtattatttgaagttaggtccaaaaaattaaggagccagccaggagatatatgctttccaggtgggaaaatagatggaaatgaatctcctaaggaagctgcacttagggaaatatctgaagaacttggcgtagaaagcattaatatagtaaatgaattagatactatagtaaggtatgatggcataataattcacccatatgtaggaattattaaagatcttaatgagataaagataagtgaagatgaggttgatcatgtgttttatgtaccgttatcttatcttttagataataagcctcgtgtatataataataaaataaatattgaaagagataaggaatttccatatgatttaattgttaatagggaaaactataaatttagagaagctaattatagatctttattttataaatatgaaacttataatatatggggaatcacagctgagatgctgcaagattttttggagaatttgtagccaactataaaaaatgaagcatttctatcaaactcataacaattcccataaaaactagtttttttactctaaactttgcaggaatagctatattgcttgggaatatgtataaacaggaattaacaaaagaagtctagagctgagagtaaaatcttggctctttttttcatacctagaaatagatttagaggataagtaagattggatcaagtaggaatacagacaaatatattaatggattacagagaaggatagggttttaagatgataattaaaaattatattattgtacagcattaatatgagggtgggcgtgaggagaaaaattaaatataaatataatgaaagaaacaaatattattagatagtgataaatttatttatatttagtgcgaataattgtaagaaaatgatataatttacataaagtgaaacaaaattataatttgtatgataggttggattaacaatttgtttgtaaatgaaattctctgatatcatgatttaaatgataagaatatatgtgtaatatttaagtcaaaagaatcaaagctattttacggcaatatttatgagtcgtgaatattgaaaaatgtgtattggaaaaaatattatataaataatattaaagaaaaaacgaatttatacaggtagagaatttaaagtaggaatagaattataaaatctttggaggtaagtatggatcaaaaaagagttgcaggagaaaaatcaacagaatatataaaagatgggatgatattaggattgggaacaggttctactgcctattacatgattaaaaaagttggagaattgattaaaaatggaatgaagataaaagctgtagcaacatcaaaaagtactgagagtttggcaagagaacttaagatccctttattatcaattgatgaagttgataggattgatttagcaattgatggtgtagacgaaatagataatgaatttaatgctattaaaggtggtggtggagccttatttagagaaaaaattgtggcgagtttggctaatgaagttatatggattatggatgaaagtaaattagttgatggtattggagaatttcctttaccagttgaaatattaccatatggatacaaacatgtaattaaagaattacaggattattcattaaatcccaaaataagaatgaaggaagaagagatttttgtgactgataatggtaactatatagttgatttgcatataggaacgccaatgaacattaatgacgtttataataaagttaatagaataactggagtgctagaaacaggattatttattaatatgtgcaatcgtattattattggcacaaatagtggcgccaagattattaataatagcaacagtcaaaatgtgaagatggagcaatttagatagatattatctcatcttagaatgtatgcaggggggatgatcacatgataagggaaataataaatgaagattttaatggattaatgcaattatatatgcaacttcatggtgaatctatgccaggaaaaacacctgaaataatggaagtatggaatagaattttggaagataaagaacatcatattattattgcagaggaagaaggaaagatagtgtcttcgtgtgtttgtgtcataataccaaatttgacacacaatcaacgaccatatgcatttattgaaaatgtagtgactgataaacattatagaaataaaggattagcaacagcttgtttgaactacgcaaaagaaatagcgcataaagagaagtgttataaattaatgttattaactggctccaagaaagaaagtacgctaaatttctatgaacaagcaggatataatcaaaatgataaaactgcttttatacaatggatataatataaattgcaatttatctgagaaggagaaaaaagatggtttatttaaattattttacatttcctaatgaggatatggaatttagatttttcatgggggtaaaaagaacctgttatgattcgttttatccatttaaggtattgtcacaacatggtcttagaagaattgattttgaaccagttactattctatatggaggaaatggttctggaaaatcaacagcgttaaatattatagcagaaaaaatagggggaagccgtgattctatctataataaatctaatttttttcctgactatgtcaatatgtgtgatatatatgttgaaacagatattcctaaaaatagtaggattattactagtgatgatgtatttgattatattctaaacattcgtagcataaatgaaggaattgacataaagagagaaaagctttttgaagaatatttggagtctaaatattctcgcttccaaatgaagtcgatggcagattatgagcaattaaaaaaagtaaatactgctaggagtaaaacacaatcaaaatttgtgagaaatagattaatggataatttcagagaatactcaaatggagaaagcgcatttatatattttactgaaaaaatttatgagaatggactgtatatattggatgaacctgaaaatagtctttctccaaaacgtcaaattgaattaatgaattttattgaggactctgcacggtttttaggatgtcagtttattatatcaacgcactcaccatttatacttgctatgaaaggcgcgaaaatatatgatctcgatgaaaatcctgttgatgtaaaacggtggacagaattggaaaatgtacgtacatattatgactttttcaaaatacacgaaaaagagtttaaataataagatatgggagtgttagagtgaataaggaatttttggaatctcatctaattatagaagaaatagatttatgacagaggccttagaaacattagtaagatgggcgggtaaatttcaagggggtaaaggtataatagccagagctttaaaaacgaattttggttctattaaagtattaaataattgtaattttgaattattcagcactactgagcaagagaatatttatattaataagcttagataaattaacttatatgtatttaacaatgtttaggctcaaaaaaatataaaaactagaatttctgcgattctataaaattttaaatgacgagtatttatataatctaaggagaaataatagtttattggaaggttttgtattggttttatctagaataaataattatagattatttttaagaagaacagatacatatgaatgttgaaacaagattattacacaaaaatagcaatggtaatattgttgctaatatgtttatgagcatgattcgttgcttagttttaggagaaattaaaaatataaggagaatttaatttatgaataacgatgtctacaaagagtgtcctaaatataaaaataaattaattacattaaggaaaacaaacgaggacgatttagaagagttgctcaaatgctattcagatgaaaaagcagtaccattattcaattctgacaattgtcatggagataattttaattatgaaacaattgaaaaaatgagacaagcgattgatttttggaaatggtcatatgaaaataaacaatttgtgagatggacaataattttaaattctactaatgaaaaaattgggactatagaaatgtttcacaggttagcagaagatgaatttaatcactatggtattttaagaatagatctgaaaagtgagtatgaaacccagaatataataaaaaatatattagatatcgcaaatgaattcttttatggggattttgatgttaagcatattttaacgaaagcagttccaatggcaactcaacgtataaatgcattaatggagatgggctataagccgattaacaaaaaatttattatatatgatgattattactgtagagaaatttaatattaaaaacaatataaaaaataatataaaacttattgttttggagcttaggcataatcaaaaaataagaagtcaatctgccaagcctattttccaccatgctacgtcagcaaattacactaatagaccacctgctatgtgactaatttacttccttgcttgatgaaaaataatcatagcattttggatttgttattttcttctatatgccttaaaattataaaaattctaggctcttattcagttataaaattaattattaaaaatttcctttgcaactgctacagcatttaatacttttggaaagccaacatatggaatacattgtaagaatacttctattatttcttctttagagatcccaacgtttaatgctccattaatatgaacttttaattggttttcacatcctcctagtgtagtaagtgcagataaagtaacaagctccctttgttttaaatcaaatactggtcttgtataaatatctccaaaagcaaattcaataatgtattttgcaaggtctggagctatatccttaagtgattctattacagctgttccagcgtttccatcaacctcgttaagtttatttagccctttttcatatctattttccataattgtaatacctcctactttttgataatattatcatatatgctggagttaactccatgtcaagaggtaggtgattattttgaattattatataggagagttttctgaaaaaattggtttgagcattgatactttaagatattatgaaaagcttggtctgatttatcctcaaagagatgaagctaataaaagagtatattctgaaaaagatattgagtggctaaaatttataattcgattaaaggaaataaatatgccaattaagcagatacaatactattcgaaattgagatatgatggcgatgatacaattaaggaaagattagaattacttgaagaacaaatggataggttaaatattgaaaaaagaaaaattgaagaaaatataatacacttgaataaaaagattagtatttataagaaaatgatagataaaaaataacgaatgtctgttaatttaatttttataaaatataatatatgggaggattgaaatgagcaatatgcaagcaattatatggttttttcctatagtattcattatccatgattttgaagaaataatttttatacaatcatggataaataaaaataggtattatttatctgaaaagtttccgaaattatcaaaaaagttatttcctcatttcgataatattacaacagcatcttttgcttttggggtagctgaagaatttattttaattatcataattactattatttcgtgcaaaacaaattggtttaatttatggattggtctatttattgcttttactacacatttaataatacattgttttcaagcattaataataagaaaatatgttccagcaattgttacaagcattatatttttgccaatttgtattaatattattaaaagtatagccaaagtgtatacatcaaatattattatttcatattctgttttgggattcataattatgttagtgaatttatatattgctcacaaatgtatggacttattttccaaacagttatttaggtattggaaatttaaatttaaattaactattacaacatatataatagttattactttattgttgaggtagataaacttaatctgtaggtaccatattccatgattttatcaagtaataaattaatttcatccatattagagcatatgactttaagcaaatagcagccatctccactaatcctatgtgcctcagttataattgtattttctttaataaattttgttaatttatcatgttgtgtggttttcatgaaaatagtaataaatgcagtaatgtttttgcccagcatagaattattaatgcatacagtatactgtgttattatacctaaatcctgaagtcgtataattctattggatactccttgaggggttaggtgtacatgctcgccaatttccttaagtggtatttttgaattaatcaatagtatgtctaaaatcttcaaatctatttcatcaaacatagagcctaaaatcctttcatttttaaagagaaactaacgaatctctttcacatttcaaccttaatttaagatactattagtataacaaatataagtagatcagcaaatgtaaaggtggaatgaaaatgaaaaaagcattgctagtaattgatgtgcaaaatgaatattttacaggtaaactaaaagtaacttatcctaataatagctttgataatatattgaaggtaatggattatgcaaaagagaataatatgattgttataattgtgcagcatacagcactttttggagacacatttattaagaattcaaatggatgggaattacaaccaatgattcttgagaaatcgtacgactatattatcgagaaaactaagccaagcagtttttatgaaacaaatttagaagaaatattaaaaaaagaaaatataactgagatagttatttcaggatatatgactcaaatgtgctgtgacacgacagcaagggaagctttccatagaggttaccacgttgatttcttgtcagatgctacaggaactatagatgtaaataatgaagtaggtgttataagtagtaaagatcttcataaagctactttaattgctcaaagtttaaaatttagtaatgtaataagtactatggaatggatgaaattatctaaaatttaattttgcatagtactcatattataaatagaatatagattatatctataaatgatgctagggttaaaagtagctttctttgttacttttaatcctattatttttataactagaaaaataaagaagtttagttttcaaaaatgtttatatatttgagaattatagaagggtcaaagtgcagcaaattagatattcgtagctattttaatctctttagttaaaggatattaaattgtatacacaagattacaaatatgaaaagtgagtaataaaagattcgaaaatttactaaagaaactattttataatttcaataaacgtttatttatgatattgttattttatctcttatgaaaagctatacaaaaatatattgacttagaaaaagaacaaatatagaataacattattaaaggacattttaaaagtggttttataatgttatatatttcattaattttattaaaaaggagatcttagtaatgaaattcttaaagagcgttttggtcattatacttattgctctttttttagggagtaatttatattttattaatttattaagagacaagaaagtagaaaaggaaccgataaaacctaagatagtgctgatttctcatataaagactaatccatattggcttgatataaaagctggtgcggaaagagctgctaaagaaagaggtgcagtggttgaatttttaggacctacaactgcaagcactgaagatgggctaaaactttttgatatggctacatcagcaaaggtgagtggcataataacatatgttcaagaagaaggacaatataaaaagaaaatcaacagtgcaatggaaaagggtattccagtagttacaatagattcagatgaagaagatagtaatagaatagcatatgttggcacagataatgttttagctggacaagttgccggaaaggaaatggtcaagcaaataggaacgtctggaaatgtagcaatagtaatgggcgggaaaaacgtaaagaatcagaaagaaagggttgaaggctttacacaatatataaaatcgaattctaacttgaaaattgtagatacagattcatcggatgcgatgcttcttgaggcagaaatcataacaagaaaaatattaaatagaaatgataacataaatgctttattttgtacttcagctcttgacggaataggcgctgcaagagcagtaaaagatttaaattataaagatagggtaaaaattatatgctttgatgatttggatgatactttaagcaatattaggaatggactagtttcagcaacaatagtgcagaaaagtaatgaaatgggttatagggcagttaatattatcatggacaaaattgaagggaaatcaaataagttttcaaaatcactaatcgatgtaaatgtaattaataagagcgatgtagatagctataagcgaggagatgataaagttgaaaactaaaagcttaaatagtaaatttataatgtttgttatatgcttaattattcctatatgtatatgcaatattatatccttggcgatgagcaaaaaaattgaggacgggtatgttaatatgcttaacaatatgctcattactaatgaaattaagcagcatgttgacagctctttagataattttaatcaatatatattgaatggaactccaagtaagaaagaaagctataataatgaggtgattcttgcaaaacaaaaaattggtaatcttaagaaaaattctgatgatgtaaatcaatatattttaagagatctagataatactttagattcttatatagaaagttctaaaaatacaatatccgcttatgaaaataaggagggatacgttttttactatgatgattttgtagcagccaagaatattgcatcttattgtgatgcatatgcatcgactttaatgcaaaacttcctagaggctaatagcatagcatataaagaactaaatagaaatagcagcgtaatatatataggactagctacatatcttatattaattttagctttatgtgtagtttatgcattaacatttataagacatatatctgagggcttaaagggtatggttgaaatatcaaacaaagtatcaaaaggtcaatttgaatattatgaaggtaacaaaactgacatttatgagttagatattttaacaaaaacatttaatactatgattacagatataaaaaatcttattagctcacttaatgggaagatcgtattagaaaaaaaattaaaagaggaggagatgaaaaatctaaaatatgagaatgctttaaaagaatttgatttaaaggtattacagtctcaaataaacccacatttcttatttaataccctaaattgtataaacgcgacagcaataatggaaaatgcgataactacaagtaaattaattaaatcagtatctaatattttaagatattctttaagaagtatgagtacaaatgcactattggaagatgaaataaatattgtaaaggattatatttatattcaggaatgcaggtttgatgatagggtaaaatttaatctaagtacaaatatggatatgaaaaaagtaaaagttcccggaatgacaatacaaccattagtagaaaatgcatttatacatgggattgaagggaaagaagatggtggatatataaatatatatattgatgaggaaaatggtgagtgtaatgttttaattgaagataatggtgttggcatttctaaagaagttttggataagattaataattataattatgatgcaaaacatacagggcatacaacaggccttggaataaatatagtagaaaagaggcttagatatttatataacaagaaaaatatgtttaaagtagaaagtgaagaaggcaaagggactaaagtttatttgaaaatacctataatgggggatgagaataatgatgaaaatattaattgctgatgatgaaaagtatgatagggagaccgttaaacatataataaaagagaattttttaggagagttagaaatatacgaagccaaaaatgggagagaagcaattgaactatctgaaagcatcagaccagatatagttattattgatataaaaatgccaggtattgatggaatacaggcattgaaagaaatgacagcaactttaccaaatttatatagcataattttgacagcatacgattatttcgactttgcattggaagctgtaaaaataaatgtgaaagaatatcttctaaaaccgtttactaaggaagagattatagaaaaaattgctgtgggaattaaatgggtgaaaaaagaacaggagaaaagaaaaagtgaaattaaagataaagagaaaatatatactttattgcctgtgcttgaaaatcaattaagtgatctaataattaatgataagcttaaaggtgttgattatggaatgtatctgcaatgtttagatatgagttttatgaatagctatgcaatggttatttcaataaaagacaaatatgcttataaaaatattagcagggttgaaagagatcaaattaggattaagataggagaatatgttaaagaatatatcaacagaagatataaatgcataggaaattatgtattttatgaagaattaacgtattttatacaaatagataatgaggaaactgaagattttaaaagtttagaaattgaccttgcatttaatttgagaagagaaataaaaaagagatttaatatttcaataagagcaggtcttggagaaatatttgattcagtagagcaaatcgtggaatcttatagacaagctatgaaatgtttagtatacaactcagacaatgtaaatattatttatattgatgatatagaaggaaaattgatgaatgatagtttttcagtcgggatatcaggggatacaaagttaggtaaaaataaaaattcaaataaaataaagatgaaactatttgaaagtgtaaaacaatttattagagaaaatattgaaacagaattagaactagataaggtagcaagcaattttggattaagtgtctattattttagcaggacatttaaagaagtaaccggtgttaatttttcggaatatgtaaataaatgcagaatagatgttgcaaaggaattactttcaactggagaaatgaatgtgaaggaggtttgctacaaagtaggatacaatgatcctaattatttcagtaaagtatttaagaaatatgaaggtgttagtcctgcaaattttaaaggaaacatggaagaaaaaattttttgaaattaattagtgaaagatatgttatttattattcaggaattttttgatttataaaaagcaatatattactaacaacatatcacaacgataaaaaagtccagactatttcttatatttagatattagtctggattttctttatgttttgaattatttactagtaaaaatttgctgtaaaaagatagcaatataagattataaattagcaaaccagtctatttgaaacgtttactataacggatataattaagactgtaaaagagatctataattaaaaaaaaggggagaaaaagatgaaatctaaaaaaatgattaaattattaggtttggcactaagtggggtactaatattttcagcattgacaggatgtggagcaaaaaaagatgcacaaacatctagcaatggaaataagaaaataaaaattggtgtaagtatggacgacctaagacttgaaagatggcagcatgataaggaaatctttgaagaagaagctaagaagcttggagcagatgttgttttccaatctgcaaatggggatgatccaacacaaatgtcacaagctgagaatcttatatctcaaggggtagatgtcttagttgtaataccacataacggtgaatcaatagcaccaattgtagaagaagctcaccaaaataaaataaaagtattggcttatgatagattgattacaaatagtgacttagattactatgtatcttttgataatgtgaaggttggagaattacaagctaaagctatcgtggataaaactccaaaaggaaattatttcatgatgggaggatctccaacagacaataatgcaaaattatttagacaaggacaaatgaacataataaaaccttatgtagataagggagatataaaactagtaggggatcaatgggtaaaagattggtcagcagaggaagcattaaagataatggaaaatgctttgacagcaaataataacaaacttgatgctgtagttgcatcaaatgatagtacagcaggtggtgctattcaagcattacaagcacaaagcttagcaggaaaaattacaatctctggacaagatgcagatttagctggttgccaaagagttgttgaaggaactcaaacaatgacaatatacaaacctataaaagatattgctgcaaaagcagctgaaatggctgtaaagatggctaaaggtgaagatgttgaaacaggtggtactgtaactaacaatggtaaaaaagatgtcccttcagtactacttactccaatagcagttacagcagataacatgaaagatactgtaattaaggatggtttccaaaagtttgatgatgtatataaaaatgtaccagaagataaaagaccaagcaaataaataagaatattggagtctgatgatattgtgtcagactccaatatagaaaggagataagcatttcatgagtgagtatattttagaaatgagagatatagtcaaagaattctttggagtaaaggcattagatggagtaactttaaaagttaaaaaaggagaaatccatgctctttgtggtgaaaatggagctggaaaatccacactgatgaaagttttgagcggagagcatcctgctgggtcttactctggaaaaataatttttgaaggaaaagaattaagccaaacaagtataaaagattctgaaagcgttggtattgcaattattcatcaggaattagcacttataaaacaattatctatagcagaaaatatttttttaggaaatgaaattggcgcacgtggactagtaaattttagtgaacagttaaataagacaaatgaattattaaatagggttaagctgaatgttaatccgcttactagagcgggggatcttggaattggacatcagcaattagttgaaattgcaaaagctctatctaaaaatgcaaaactattgattcttgacgaaccttctgcctctttaagcgaaggtgaagtagaagtgttaatgggaatattagatgatttaagaagagatggagtaacatgtatttatatttctcacaaacttaatgaggttacaagaatatgtgacaatgttactgtaattagagatggctcaacaataggacaagttcctattagtgagatagatcaagataagctagtacaaatgatggttggaagagaaatgaaaaatctatttcctagagaagaacataaaataggcgaagaattttttgagataaagaattttaacgttttagatccatttaataagaacataaaaagagtaaaaaatgcgagttttaccttaagacgtggggagatacttggaatttcaggcttagtaggttcaggtagaacagaaatggtggcaagcatatatggaagtttccaaggtcaaaagagcggtgaagtatattttgagggtaaaaaaattgacataaaaaatccaaatgatgctttaagcaaaggaatagctatggttccagaagatagaaaaaaagatggaataattgcgggtatgagtgtagctaaaaatatgacaatgagtaatttagtgaaatataaaaggccattaaacgtaatagataaagataaggaaatgatggatgttttaaaatttattgatgaaataaaaataaagactgcatcaactgaattagcaataaaaaatctaagtggtggaaatcaacaaaaagtaatactagcaaaaaatcttcttgctgaacctaaaatattaatattagatgagcctactagaggaattgatgttggagccaagtatgaaatttataagttaatatttaagctagctaaacaagggatatctataataatggtttcatcagaacttccagaagtacttggaattagtgatagggttctagtaatgaatgaaggggaaataaaggcaagtcttgagaataatgggttaactcaggagatgattatgaattattctgtaggaaagaaaaatgaagaagttagtgagagttatagcgaagaaactaaaacttctgtaggaggaatataagatgcaattaagtaaaagtacaagttcagaaaaagaaaagaaattaggtttaggcgttatatttaaatctaagatggcagcaatattaatagcaacagcagcaatatgggttttgttcacgtttttaacagatgggaattttttaacaacaagaaatttatcaaatttatttaggcaaatgtcaattactggtgtacttgcaataggtatggtttttgtaatcattttaggtgaaatagatctttcggcaggatcaactttaggtttacttggaggaattgcagcaatattaaatgtttggtttggtttttcagctatcccaacagtggtaataacattaatacttggagttattatgggagcttggaatggatattggatagcatttagaaatgttccatcatttatagttactttagcaagtatgcttgtttttagaggtgtattaataggaattacaggtggtaatactgttgcaccattaacagcagatttcaaagctataggacaagcgtatttaccaacagttgtaggttatatattagtagtgctagcaattgtaggttcagcatatttaatattaggaaatagaaagaataagattaaatataatattgaagttagaccaatggctttagatgtacttacaatagtaggaattggagttatatcattagttctagtgttaattcttaatgactatcaaggatttcctataccagttttcattatgttacttttagctttaatattagcatttgtaggaacaaagactatatttggtagaagaatatatggaattggtggaaatagagatgcagcaagattatctggtataaacgtaaaaaaacatattattgttatatattcagtacttggattactttgcgcagttgctggaatattacttacatcaagattaaatgcaggatcagtttcagctggccaaaatgcagaaatggatgcaattgcatcatgcgttatcggaggagcaagtttagcaggtggtagtggtacagttgccggagcattagttggtgcacttgtaatggctagtatagataacggtatgagtatgatgaatactccaacattctggcaatacatcgttaaagggttaatattactaatagcagtatggatggatatatcatctaaaaacaagaaataattctttgaaaatgattatatattcttaattaaaactttatataaattagtgacgacaaatcatttaaataacagcaggctataattaatattgtctgctgttatctgtatatatggtatattaattctatattttgtttaacataaaaaggtatgaaaaggacataattataattaattattttattaaaaaataacataaaaatgtactcagaaaactattgactatataaaaaaaagaaagtattataaacttataaaataacatttaaaaagttatttcaaaatatatttttagtagtgaatatcaaaagaataagtactttgacttactttaataattattttgattaaagcttgttatacaaaataaaattcagaatattcattaaaatcaaacaaatttgatttatatataagggctagttattactaacgttggcttttataaatagataaatggcttaataagttattacgctatttactagaaataatttatattcaatatagaaaaatgaggagggtatcatatgagagaatactttgaaaatgtttcgaaaataaattacgagggggcaaattctaaaaatccatattcatttaaatattataatccagacgaaattattggggataaagcaatgaaagaacatctaagatttgccttatcttattggcacacattaacagctacaggagcagatccatttggtgttgggactatgattcgtccatgggatagcgaaacaaatgaaatggatttagctaaagcaagaatggaagcagcatttgaattaatggataagctaaacatagaatatttctgcttccatgatagagatatagcaccagaaggaaaaacattacaagaaactaataaaaatttagatgagatagttgcgttgtgtaaaagtttaatgaaaaagtataataaaaaacttttatggggaacagctaactgttttactaatccaaggtatgttcatggtgcaggtactagctgtaatgcggatgtatttgcttatgcagcagcacaaattaaaaaagcaattgaaataacaaaagagctagatggagaaaactatgttttttggggtggacgtgaaggatatgaaactctattaaatacagatatgggattagaattagacaactttgctagattacttcaaatggctgttgattatgcaaaagaaataggatttacaggacaatttttaatagagccaaagccaaaggaaccaacaaagcaccaatatgattttgatgcagcaacagttttaggattccttaaaaattataaccttgataagtattttaaagttaacattgaagcaaatcatgctactttggcacaacacacattccaacatgaacttcattttgcaagaatcaataaattcttaggcagcatagatgctaatcaaggagatccattacttggatgggatacagatcagttcccaacaaatatatatgatgctacattagctatgtatgaaatccttaaaaatggagggcttgcaccaggtggtgttaactttgattctaaagttagaagggcatcatttgagaaagaagatttattcctagcttatatagcaggaatggatacatttgctaaaggattgagagttgcttataaacttttagaaaatggtgatttagaagactttataaaggaaaaatattcaagctttacagagggaatcggtaaagaaattgttgaaggaaaagttggctttaaagaattagaagcatatgcgttaaacaataaccctataataaataaatctggaagacaagagctgttagaatctatagttaatcaatatatatttgaggatcataaataaataatatgtaatctagatttattcatttcaccaaaataagaagcatgcttttattccgacttgtacgggattttatggatgattctaagattagaagttgtacccaaaggctagccttaaaggtaagatctaagtaaatacatttgaaaaaacttctaacttgtaaatttatagttaaaaggacttcttgtaatatttttcagtattattattgcaagaagttcctttttatttaggactctattttggtagatattttataataagtgcaacattctaaatacaaaaaataactagtaaaataaaaaatgaaaatgtattcaaaaaactattgaccgcaaagaaaaagggaagtataataaacttattaaaatacatttaaaaagttatttaaaaaattaagtaaaaagtttgtaattatgttaatttagaaaagatatataacttaggaggtttattaatgagatatttattaggattggatattggaacatcaggaacaaagacagctctttttgatgaaaatggaactacaataaaaactgcaacttatggatatgatttattccaaccacaggtaggatgggcggaacaagatccggaagattggtggcaggcatgtgtaaagggaataaaagatgttattgaaaaaagtgatgtacaagcttctgatattaaaggtattggattaagtgggcaaatgcatgggcttgttatggtagataaagatcttaatgtaattagaaattctataatctggtgtgatcaaagaacagaaaaagaatgtgattacatgacagaagtaatcggaaaagaaagactaattaagatcactggtaatcctgcattaactggatttactctttcaaaattattgtgggttagaaataatgaaccagaaaactataataaaatttacaaaatacttcttccaaaagattatattagacttaaattgactaatgtttttgcaacagaagtttcagatgctagtggtatgcaaatgttagatataaatactagaaactggagcgaagaattacttaatgagttaaatatagataaaaacatattagcagatgtttatgaatcagtagttgttagtggaaaagttacagaggaagttgcaaaattaacaaacttagcagtagatacaccagttgttggtggtgctggagaccaagcagcaggagcaataggaaatggaatagtaagagaaggaataatatcaacaacaataggtacttcaggagtagtatttgcggcaactgatacacctagatttgataaagaaggaagagttcatactttgtgtcatgcagtaccaggtaagtggcatataatgggggttactcaaggagctggtctatcattgaactggtttaaaagaacattctgcgctaaagaagttgaagaaagcgagaaattaggaagagatatctatgatttattaactgaaaaagcagcaaaatcaaaacctggttctaatggaattgtttacttaccatatcttatgggagaaagaacacctcatatagaccctaatgtaaaaggtgcatttttaggagtatcactaataaataaccatgatgattttgtacgtagtatattagaaggtgttagctttagtttgaaaaactgccttgatttaatcgaagacatgaatgtaaacattgatgaaataagagtaagtggcggtggagcagaaagtgctgtatggagacaaatattagctgatattttccaatattcattaactacagttaaagcatctgaaggcggtgcgcttggagttgcaatattagcaggggttggagcaggaatctatgattctgtagaagatgcttgtgatagaatcgtaaaaggaaacaagaaagtttctccaaatgaagaattaaaagaagtatactcaaaagtatatgaaacatataattcagcttatccaagaataaaagatatttaaatatattaaagatagaaatcaatcatcttagttaagtaattgtataattaattaagggtgtgtagtagtatcgaattttagcaaaaaaatcatatagttttttaaatactttaacaaaaataataatagtgatattatttaagaaaaagctactattactgataatagtcgagaggagtattttaaagtttgatagaagtaaatcacagtaaaataaaagaaactaacagaaaaaagataatagcattattattaaagaaaaatgagatcaccaaattagatatatctagaatattagatataagtataacaacagtttctacaaatattacagaattgaaaagcgaaggtattgtagaagatgtaagatcgttggaatctacaggaggaagaaaagcaattgctattaagttgaatgaaaactgtagatattcaattggagtcgcactaacaccgaatcatataaagatatcattagtaaatataaagaaaaaagttattgaaagtatgcgagttagacataatagtgatggaatagagaacataataaatttacttaatgaaaatatagatttgttaatgaagaaatataatttatgctctgcaaatttattaggaatagggatttcattacctggaaccgtagattttaaagaaggcataataaagtattcatatttgttaggcgccaaagattttaatttaaaggaaaagttcgaatacttagacattccagtatatgtagataatgaagcaaatttatctgcttactacgagtttttaaataaaagagatatactaagaaatctattatatgtatcaataacagaaggtttaggccttggtataataataaatggaaaaatttacagaggtgacaataactcatcaggagaattaggtcatactaagatagcaattgatggaaaaaaatgtaagtgtggagctagaggctgtttagaagcatacacatctatgaattctctgattgatagttataatgaagctaatagttcaaatattagtgatattgatgaatttgaagaaagatataatcaaaatgacaaagatgctcatgatgtattaaatgattatttaaaaacattgtctttaggtctatcgaatttggttatgatatttgatcctagcagcatagtaataggtggagatataaataatttacttaatgataagatagatatgctgaaaaaagaggtttataaagataatttatttacaaatgaaaataattgcagtataagtattgcaagttttaaagaatcttatctactaggagctgctatgatgcctatagaagaattcttagaaattaaataatggagtggtgaaagctgctctattaatttaaaaacttattaaataaatttttaaaatatatttttaaagttatgtaagcatagctatattaaggggggtcttaatctttgattggaactccagattaagacaagccttttatataaaactaaatatctatttatttcatattagatttatgttcttgatttttgattggaactccgaattaagagcaaatttcttatgtgttattaaataaatatttacataaaggtgagtcttaagtaagaaattaaaatttcttatttgagatagccttatatattaaatgatttttaattaaacaaagaggagatgttaataaaatgagatttttcttagacacagcaaatgtggaacacattaaagaagcaaatgaaatgggagtaatatgtggtgtaacaacaaatccatcattaatagcaaaagaaggaagagacttcaatgaagtaataaaagaaattacagaaatagttgatggaccaataagtggagaagttgtaagtgaagatgctgaaggaatgataaaagaaggaagagaaattgcagcaattcataagaatatgatagtaaagattccaatgacagctgaaggtttaaaggcaactaaagtattagctagtgaaggaattaaaacaaatgtaacattaatattctcagcaacacaagcattacttgcagcaaatgcaggagcaacatatgtaagcccattccttggaagagtagatgacatctcaatgataggtatggatttagttagagatatagcagaaatatttgcagtacatggaatagaaacagaaataatagcagcaagcgtaagaaatccaattcatgtaatagaagcagcaaaagcaggcgcagatatatcaacagtgccttatagtttagtaatgcaaatgctaaaacacccattaacagatcaaggattagaaagatttaaagcagactgggcagcagcatttggaaaatagattgccgaaataagaaacatattttggttccggttcctaagaaattttgttgagtgcttctaagattataagttgtgcccaaaatgcttggcctcaaaggtaagcgctcacagagaaagttcgagaacccaaatataaaatttggactctcactttttgaacaagcacatttggaataacttataatcaataagcactaccaacacaatttctaatgaacactccacaaaatatgttacttatttctagtgcagacatatttcgaaaatggaagagtaatttagagatatgatggctagattctgaaattaggaaggcataaatgtttatggataaatattttgatataacgctttcgcaaaagcatgaccatcatttctgttttagttatatttaaaatggtaaaaatatatattcttaagaatataagaatataagaagttaagaatttaagaatataggaatttaagaatttataaatgaaaacataaaacaatttcaaaagatgtggtaaaataggcaccttttgaaaagataatgaaggatagctaagattatttcagtttgaaatgaattcgaagcgcagcatggaacttaattagcacaactaataacttataaaaaaatatgtctatgaaatgaggataaagatgagtagagaattagataaattatctattaacgcaataagagtattatcagcagatgctattgaaaaatcaaaatcaggacatccagggttaccacttgggtcagctacaatggcttatacattatgggcaaagatgaatcataatggaaagaaccctgaatgggataatagagatagatttgtattatcagcaggacatggttcaatgcttgaatattcattgctacatttatttggatatggacttacagttgaagatattaaaaactttagacaattcggaagtttaacaccaggacatccagagtttggtcatacaaaaggtgttgaaataacaacaggaccacttggacaaggtatttgtaatgcagtaggttttgctatagcagaagcacatcttgcagaaaaattcaataaaccagattatagcgtagttgatcactatacatatgctatagttggagacggatgccttatggaaggtatctcaggagaagcgtcatctcttgctggaactttaggtcttggaaaattagttgtattatatgattcaaataatatttcaattgaaggaaatacagacatagcatttagagaagatgtagctaagagatacgaagcttatggatggcaagtactaaatgtagcagatggaaatgatatagatactatagaaaaagcaatagaagcagctaaagcagaagcaacaaaaccatctattataatagttaaaaatcaaattggttttggatgtccagcaaaacaaggaaaagcttcagcacatggtgaacctttaggagcagacaatgtaattgctatgaagcaaaacttaggatggaagacagaacctgcattctacgtaccagacgaagtgtatacaaatatgaatgaacacatagcaaaaggtgaaaagactgaagaagcttggaatgagttgtttaaatcatatgcaaaagcttatccagaacttgcagcagaatatactaaatggatgagtggagaacttgataaagaagctttattaaacaatgaagaactttggagctttgataaagaaatggctacaagagaatcttcaggaataatgataaatagattagctaaactaattccaaactttattggaggatcagcagatttagctccatctaacaaaactcatatgaacgatagaggagatttctcagcagaagatagaagtggatcaaaccttcactttggagttagagaacatgctatggcagctatcgctaacggaatgtatgctcatggaggacttaaagtattctgtgcaacattctttgtattcagtgattacatgaagggtgctatgagattatcagctcttatgaatcttccagtagcttatgtattaacacatgatagtattggggtaggggaagatggaccaactcatgaaccaatagaacaattagcagctcttagaagcatgccaaatatgacagtatttagaccagcagactcaaaagaaactgcagcagcatggtattatgcagtaactaatggaactactccaacatcactagtattaacaagacaaaagttaccactatatgatggatgtcctaagagagcattaaagggtggatatatcttaaaagattctaagaaagaaactccagatgtacttttaatggcatcaggatcagaagtagaattaatctacaaagcagcagctgaattagaagctaaaggaatagatgcaagagttataagtatgccatcatttgaattatttgatgctcaagacgaaagctataaagaatcagttatgccaaataaagttcgtgctagagttgcagtagaagcattaacaagctttggatggcacaaatatgtaggtcttgatggagatgttatatctttagatacttttggagcatcaggtaaagcagaaatcctattcgagaaatttggattcactgtagaaaatgttgttgaaaaggctattaatgtagcaaagaaatagaagttacagtaattaaatctacgatatagtagagaaaatttagcgattatagtaaaactttagaaaaatagatttaaccttaaaatattaataaatatagcgaaaagatataaaaaaagatctagattaaaagtgtgtaaattaattaatctataaatatattaaaaccaatttattcattattataaaagttaaaattattaaaagatatgtataaagatgtgtgaaaagattagtgtgaaataatgtaattaaaataataaatcattggttagaaatatatttatagatttttaataaatgtatatttaagaaagggagattaatatgattattaaaaatgttaatgataaagagtttaaaaagtatggacaagtactaaaaaactatgattgcacagaaataattgaaaagatgaaaagtacaccactaccagaagatgtaatatatgaaccatcaattaaggaacttgaagaattagctatagctaaagagttacaagatagagaatatggagaattaccaatacaaataggatactgtaatggtaacaactatatgttaaatgcagtagaatatcatcgttcatctgagattaatatagcagcaactgatcttatattacttataggaagtcaacaagatattgaagacgattactcatatgatacatctaaaattgaagctttcaaagttccagctggaactgcaattgaagtatatgcaactactcttcattatgcaccttgcaatgtaaatgaagaaggttttagatgcgttgtagttttaccaagggatacaaatttgcctttagaaaataaggttgaaaaaagtggagaagatgcgttattatttgctagaaataaatggttaattggtcacaaggatacagatttaggtgatcaaggcgcatttatagggttagttggagaaaatatctcaataaaatagattataaatagaaattaaaatccattaatttgttttgaatctaagcagacatattgactctatgatttaaatatgtttgcttattatatataaatcagcaaagaaatatagctgatatttacttgataataataaatttaaataaactataagaagacttaataagcataaaaattattaaataaactataagaataaactataagaataaactataagaaataaactataagaaataagaaagacattataaattaaatgaaaagattagagtaaaatggaggaattagacaatgaataatataccacaagtaaaattaggaattgttgcagtaagcagagattgtttcccaatggaattatcagcaaatagaagaaaagcagtagtagaagcttttaatggagaaatttttgaatgtcaaacaactgttgaaaatgaaaaggatatgagaaaagctttagctgaagttaaagaagctggagtaaacgcattagttgtatatttaggaaactttggtcctgaaacttcagaaactttacttgctaaagaatttgatggaccagttatgtttgcagctgcttcagaagaaagtggagataatttaataggcggacgtggagatgcatattgcggaatgttaaatgcaagctacaatttagctctaagaaacattaaagcatacattccagaatatccagtaggaacagctccagaagttgcaggaatgatttctgaatttgtaccagttgctactgcactacttggattaaagaacttaaagataatttcttttggtccaagacctcaagatttcttagcttgtaatgcaccaattaaacaattatacaatttaggtgttgaaatagaagaaaactcagaactagatttatttgctgcatttaatgatcataaagatgatccaagaattgcagacgttatagctagcatggaaaaagaattaggtgaaggaaataaaatgcctggtatcttacctaagcttgctcaatatgaaattacattattagactggatggaagaacataaaggttcaagagaatacattgtatttgcaaataaatgctggccttcattccaaacacaatttggatttgtaccatgttatgtaaacagccgtttaacagctatgggaattccagtatcatgcgaagttgatatttatggtgcattaagtgaatacattggaacttgcataagccaagatgttgtaacattacttgatataaacaatacagttccagctgatatgtatgaatcagaagttaaagggaaatttaattattcattaaatgatacatttatggcattccactgtggtaatacagcagcttgtaaattaacacgtggaacaatgaaaaaccaaatgattatggcaagagctcttgaaccaaatcaagaaccaaatataactagaggaacacttgaaggagacatagtaccaggagatattacattcttcagattacaaagtaatgcagatgcagaacttacagcttatgtagcagaaggtgaagtattaccagttgcaactcgttcgtttggagctataggagtatttgcaattcctgaaatgggaagattctatcgtcacgtattagtagaaggcagatatcctcatcatggagcagttgcatttggacactttggaaaagctgtttacaacttatttagatatttaggtgttaaagaagttggattcaatcaaccaaaaggtatgctttacaaaactgaaaatccatttgcatagtttaaaatttataaatatctaaataataacttagaattatgcgatagcttaccgaaatcataaatattttggttacgaaaagctatgaaaatgtcgctgaaggttctaagcagcaggttgtatccactttagcatgctccaactttcagtttgacaagctaaaatggaacaacctacagctaagaacctttaacagctcattttcatatgttttctccacaaatatatttatgatttctagtgaggatattaacttaaagttttagcaactttgtaaatatgttcacctaatgaatctaattcttaagttttttatttataaagataagtcattaacatataattaattctgtttatataaagatataggctgaaagcataatatttatagctttcagcctttgttttatgtattttcttagaagtgcataagggggagactctagatttgtttgttattaattgttaaattctcaatatattaataagttttgtgataaatataaaaaaatatcaataaaatattgacaaatggtagtactataaaatataataagacatagataaagcaatggagcatttattttatataggtgttttattgcttttttttatttattattgctgatatatcagtgggatttcaatgaatttcagtgaaaggagagataaatctgtgtcaagctgaaaagtcgtatgctaaagaaatatataagcaaattaagttagatattttgaaccaaagaataaaggatggcgattttcttacattatcagaattggcagataagtacaatgtgagtaaaacacctgtaagagatgcgctaggagcgttagagattcagggatatcttaaatctttacctagaaaaggttatttagtaaaacctataacacagaaaaatataagagaatcttttcaaatgagatttatttttgaaaaagtagctgtaagtttagcagttaaactggctagtgattcggaattgcaaaatataatgcaattagctgcgaaatttccagaagtctcgcaggaaaatgagattgcacggtttaatgagttaaatgatatgtttcatatgtcgatcataaagtcaactcacaattctcttctaattgaaatgtgtgaaggagttatggaaaatttatcacggatactaatgacagatagcaaacatttagagtttgtgaatgaaaaagaagaacatataaatatagcaagagcactgattcatagagatagtaaaactgcagaaaaacttataacggagcatcttctacatttagaatcaagagtaaatactaatgaaagcattatagtataagaagtaaagtttagggtaagcttttagttagaagaagagttttgctttttgaatgtaaaggtatgataagaacttctatatttacaaagaatgtgtaaaaattttaacttattataaaataaaaattattaataaatacttttttaattaattaagggggaaaaaaaatgaacaaaaaatcgttagtaggaattgtactagcatcagttatgacagtaggtataatggcaggttgtgggtcatcaaaaaatgattcagcaaaaagtggtgatggaaacaagaaatatgtaattgcatgtgatgctaaatatgcaccattctcttttgaggaagatggaaaatataaaggtatagatgtagaacttttagatgcaattgcaaaggaagagaaatttgaatatgatttaaagccaatggactttaatggaattattcctggacttacatctaatcaattagatggtgctattgcaggaatgagtattacagatgaaagaaaacaatctttagatttctcagatggatattttgtttcagggctatcattagttgttaataaagataacgctgatataaaaggtgtagacgatataaaaggtaaaaatgcatcacttaaaaaaggcacagcaggagcaaaatttgctgaagacaatgaatcaaaatatggattaaagctaaactattttgatgattctccatcaatgttccaagctgttgaaaataagaattgcgatttcttattagaagactatcctgttattgcatataaaattaaggttgatcctgattcaaaattaaaaattgcaggagataagctaacaaatgttgattatggatttgcagttaaaaaaggtgaaaatgcagacttattaaagaaattcaatgaaggtttgaaaaaattaaaagaaaatgggcaatatgataagatcgttgatcaatatattgctaaataaatagtagataaaatatgaactactaatgattaaaataagctatgagtttattttaaataaaaagctatgaacttaggagacgatgtttctaatttatagctttttcctattaaaattgaatttgaaactgaaataaaaacttaattcataaaatgagtattaaatatcaaaaatgaaggagaatgcatcacttgattcataattatgaatacatagcttttataaaatctttgttttgaaacagtaaatattgcctataaacgcgcatatatattagatataattattttattatatggcttgttatatttatacatatacttaatgcattgacagtttttgaattaaactatataataagtttcataatgaagtaaaaaattatttgaaatttattgtgtggaatggtttttccagagtgcaataaattagattttttaattaaaattaaataaatattgcaaaggggcaaggaaaaatgaacaaaagatcattattaagtattttattagcatcagtaatgtctatagggctaatgactggatgtggtgcatcaaagagtgataaaggatcaggtgaaggaaataaaaagtatgttattgcatgcgattcaaaatttgcaccattctctttcgaagataatgggaaatataaaggaatagatgtagaacttttagatgcaatctcaaaagaagaaaattttgaatatgaattaaaaccaatggattttaacggaataattccagggcttacagctaatcaattggatggagctatagcagctattactataactgatgaaagaaaacaaacattagatttttcagatggatattttgtatcagggttatcaatagttacaaataaggataacacttcaattaatggagtcaatgatttaaatggaaaaagtgtttcaataaaaaagggaacagcaggagcaaaattcgctgaggataatgaagctaaatatggattaaagctaaattattttgaggattctccatcaatgttccaagctgttgaaaatggaaatactgatttcctaatggaagattacccagttattgcgtacaagattaaagttgatagtggagcaagattaaaaattgttggagataaattagatgctgtaaattatggatttgcagttaaaaaaggtgaaaatcaagatctattaaagaaatttaatgaaggattaaagaaattaaaagatgatggaaagtatgaccaaattgttggtcaatatataggaaaatagtaaggagaattaaaaatggagatttttcaactactaaaagatagtctacctagtttattaagcgggctttcagtaacaatagaagttgcagtaatatcattaatattagcagttatattcgggataattttaggaatatttagcataagtacttcaaaaattttaaaaggtatatctacaatatatatctacattgtccgtggaacaccacttatggttcaagctttattcttatattttggtgttggacaggcatttggtataagatttgaccctatagttgcaggtgtaataactcttactgtaaatgcatcagcttatatggctgaaatatttagaggcggaatacaggctgtagataatggtcaaatggaagctgcaagaagtttgggacttaattactcaaaggctatgagaaaggttattttaccccaggctgttaagattatgattccatctatattaaatcaatttattgttacattgaaggatacatcaatattgacagttattagtataagagaacttacatcatcaggccaaattattattgcaagaaattttaaggcacttcagatgtatgcaattgtagcttgtatgtattttatagtaataacaatattgactttaatatcaagttatatagaaaggaaaatcagctatggtaataagcgctaagaatcttaaaaaacgttatggacaattagaagttcttaaagatatatcagtaaatgttacagaaggtgaagttctttgcattataggcccttcaggatcaggaaagagtactttcttaagatgtcttaatggtttagaagaaattcaagcaggtagtattacaatactaggccaagagcttgtaaataataaggacataaataaattaagagaagaaattggaatggtgtttcaatcttttaatttatttccacatctaacagttcttcaaaatatgttattagcacctttagaattaaagaagatgaacaaagctgaagcaactgaaaaagctctttcattattggacaaagttggattaaaagataaaaaagatgtttatcctgataccttatctggtggacaaaaacaaagggttgcaattgcaagagctcttgaaatgaatcctaagataatgttatttgatgaaccaacttctgcactagatcctgaaatggttggtgaagtgcttaaggttatgaaagatctagctcaagaaggaatgacaatggttgtagtaactcatgaaatgaattttgctagagatgtatctgatagagttatatttatggatcaaggatatatagttgaagaaggtcctccagaagaaatattcactgcacctactagtgatagatgtaaagagttcttagataaggtaattaacaattaaaatttactatatgagaaataaagagcattgtttcaatttcaatatttaatgatattgagaaacaatgttctttttatatatttttcatggttttttacttgatttatttattaatatgctataatttatatttattaggtattataagtagaataataaatctaaacattaactcgttaaaatatataaagaaatacattatattttcgatttacttgtttagaaaatatggcacatagaaattggggaggataaaaatgatacaaattaatccgaaaaattctgaattaaaaaatataataattctagctactggaggaactatagctggtacgggagaagaggggaagactactaattatacagcaggtaacatagatatagaagtactagttagtagtgtcagaaaccttgataaaatagctaatatatatggtgagcagattgctaatgttgatagtaatgatataactatgaatcattggttaactcttgctaatagaataaatgaactttcaaagcaagacgatgtggatggctttgtaataacacatggtactgatacattagaagagacagcatactttttagacttaacagttaaaacagataaaccagtcgtattgacaggagcaatgagaccgtcaacagcaacaagtgcagatggacctttaaatttatatcagtcagtagcattagctgctagtgatttatctagagggcatggggccatggttgttttttcagatggaatttatagtggaagaaatgttcaaaaaatcaacacttttaaaacaaatgcttttaactcaattgaatttggatgtcttggttacatgagggataatataccattcttttttaataagtcaataaagccacatacaatttattcacaattcgatgttacaggattaactgagttgcctaaggtttctatcgcatatttccatattgacgctgatccttcgattattgactactttgctcaaaactcagaaggaattgtaatagcaggtgcgggaagtggtactttcagctcaaattggttggaagaaatcaagaatcttgaaacaaagggtattccagttgtgagatcttcaagaataggaaacggtataatattaacagattcaactatagataaatactcaaattgcattccaagttatacattatcacctccaaaatctaggatattacttacactggcacttactaagactaaagactactctgaaataaaaagaatatttgcagagtattaattcaaatattataaaaatttcaactaaatgtagtttggtataaaatgtttcatagatctcatacgaattggaaaagttatatttaaggtaaagatggtttataaaaatactatctttacctttttatttatagataacccaactacaatctatacttatgcgtataactcagcgaaatgaataatatacttttgttccagtttctaggttattttgatgggtaattctaaggctataaagttgaacccaaagtgctagactcaaagcacaagcgctcacagagaaagttctgcttaccaaatgtaaaatttggagcatcactttttgaactagcgcatttggaatagttcaaaggaaactcgactcacttcgttcactgagtaatttcaattgaccaaatcatagatttggaatttcaattaagaattacatccatcataattaccaatgaaacattccacaaagtatatcactcatttctggttggaatatattgcatagtctaggtatagtttatgattgtgttatctatataggtatccaatttaagaattcgacttattagatgaacagatttacaaaattgctagaattttaagctcatatcgttactagaaatcataaatatatttgtgaagaaaacatttgaaaatgagatgttaaaggttcttagctgtaggttgttccattttagcttgtcacactaaaagtgggagcatgctaaagtggatacaacctgctgcttagaaccttcagcgatattttcatagcttttcggaatcaaaatatttatgatttcggtaagttatcacgtaaatacagttttaaatttggatattaagaaatattttagtcatcaaataaaacttcgtattcatataataaatgaaatcaatataatgttatagggcttttatatgaaagaacaatgtacagaaagcaatgatttttttaagagaatatataaaacgggtaaattaattgaatttgatgaaaattctaaaatagtatttataagtgatgttcataggggcgacggcgggtatgctgactctttaagacaaaacagaaatatttataaagctgcgcttggattttattatgaaaatggatatactttaatagaattgggtgatggtgatgaattatggaaaaataaagattgtttagatatcgcctataattataaagatgttttttcaatgcttaatggcttttatgatgataacaggttgtgcttggtatacggaaatcatgatatagtaaaagctaacccagaatttataaaacggcaagaaagactttttgcaaatgccggaagtggctttggacgtgagatgataaacttatattccaatataactttttatgaaggtgttatacttagatatatgccatcaaaagaggatataattgcattccatgggcatcaagtagattttattaattgtgagatgtggaaaactagtaggtttctagtaagacatgtatggagatttatggagggagttgcagggtttaaacctccaactagtccggcaagtaattatgataaaggaacaaaaatagatcatatacttggacatttagctcgtaaggagaaaaaagttataatctgcgggcatactcacaacgatatatttcctgaagcagatgaggggatttatttcaatgatggctgctgtgtgtttccatcagcagtaacttgtattgaattaacaggtggtaaaatatcattaattaagtgggctatagaagttgatagtaaagatgttttatacattaataaaactataattggaggtcctgaaaatttagaaaagtacttttattatgcaaaacagttttagagtagaagaacgtttaaaaaggagattatgtatgaagtttattgatttacattgtgatactgcaagtagaattttttatgaaaagttaaatcttaatcataagaagtgtaaagttaatattgaaaatttaaaaagaggcgaaaatttaggtcaggtttttgcatttttcatagagaaagaatcaattgaagatccatatgatgaatttataaaattatataatagctttactcaagaaataagtaaaaatacaggagagatagagattgtaagaaatataactgagctaaaaaatgctgaagaatcaggtaagattggggcttttttatctatagaagaaggagaagtcattaaaggagatatacaaaagctaagaactgtatatgatatgggaattagaatcataacaattacttggaattaccaaaactcattagggtatcctaacgcaggttatacttatagaaataaaggattaactagaaaaggagtcgaagttattgaagaatgtgaagccttaggcatgattcctgatgtatctcatttatcagatgctggattttatgatttgattagaatttgccaaaaaccatttatagcttcacattctaatgcacgtgcgatcacagagcatcctagaaatttagatgataatatgataaaattattagctgaaaagggtggagtaatggggataaacttttgttctgattttttaggaaatgaaagtgtatcttcaatagaagaaatgatttgtcatataaaacatattaggaacattggaggaattgatgtacttgcccttggaagtgattttgatggaatacacaatgaggtggaaatagaaaacgcttcagaatttaataaattatatttggcacttaaacaaaatcattttaaggaatcagagatagaaaaaatattttataaaaatgtcctaagggtttttcaagaaaacttgaaataataaaaattcatatatatgctgcaattgaaaattacgactaaattcttgaaatgcatgtgttatagaaaattttaatttataaaatattatcttaaattatcagtcaatacaaactaaataattttatgaagagtgaatatgttatttagaagttatatagtagaatacaatgaaaatttaaaaggtggtgaatttgtcagatattcagttatataatatctgactaaggtttgttatgaataaattaaggggtaaagttgcattaattacaggtgcatcaagaggcataggaagagctatagcagtagaactcgcaaaggaaggtgcaagcgttataataaattactctactgatgacgaaggcgcaaaggaaactttggaagaaataaagagtataaacggctatggagttatagtaaaaggagatatatcagctttcgataattgccaaatgatagttgaagaagttttaaaagtaatggggaagattgatattctagtaaacaatgcaggcataagtcatataggcttatttatggatttaacagaagaagaaataagcaggatattgaatacaaatcttttaggagcaatttatttaacaaagaatgtcctaaataatatgatttccagaaaaagtggaactgtcataaatatttcttctatgtggggagaagttggagcctcttgtgaagtgttgtattcagctacaaaaggcggattgaattcattcacaaaagcacttgcaaaagaagtagcgccttctaatgtaagagtaaattgtatagctccaggagtaatagatacaaaaatgaactcatttttagaaggagatgaaaaaaaatccctagaggaagaaattcctctaggaagatttggacttccaagtgagatcggtaaaattgctgtatttttatctagtgaagattcatcgtatataacagggcaaataataagagcagatggtggatatatttaatgtatatccgcttactcttcttcaccttcaggtgatactattttctccaagtaaaaataaaattctacaccattattgatgttctgtaaattaaactcactgttatgaagacgtagtatatttttaactattgataagccaattccagtactgttcttttgagttctttctctagatttatctattctatagaatttatcaaaaagtttgcttatttcagcctcaggaataactacgccaatattttgaacagatattttaaacttgtctagaccttcttcaatatttacgtttatgtcattgccaggaggagtatatttaattgcatttgttataagattagttaaaacctgctccatttgaaatggatctgcataaacatagctataaggtattgatgaattaaagtttacattgaacttattttcttcaaagtctagcttatgcttctttaatattttattaattaatctattaatattaaaagattcaaaatttggttttataatcccagattcaagttttgaaagttctagcatattagtgactaatacagtcatcttttttgactcatcaattatagtttctaaatataaattagcgtcttcgccagatacaataccatctttaatgccttctgcatatccttctataattcctattggggtttttagttcatgactaacgttagatatgaaatcttttctcatatcttctaattgtctttctttttcaatatcatcttttaatttcttgtttttttgctgtaaatctactaaagcagcttgtagatttttagataaaaaatttagcgatttggcaaggcttcctatttcatcatctctatcagcttcacaaacttttgctgagaaatccatatgagatattttgtttgctgtattggttaagtttacaagaggcttagatataaggttagagtaaattgaagaaagtattattgatataacaatcaatccaaaaaacaaatatacaaaaaattcactcataacttcagaggcttcctttattggctgaattgaagcaacgcaaaaaataagactatcatttttggtggttatggacatagggctaattacaccaatcttacttaagccgctgctctcattggtaaaagttgtatacttggtttgagaatgagtaataacatcattaatcaaatcgctattatttattaattctttaccaaaagaagttaaggtatcaaaactctccttatcactataaatattgttagaaaaatattttatatctccatttgttgatgtaatgatgattttagcattattatcattctcaaatttttgcaaggccttatacaaatcagcatcattgtcaatatgaagtgaatataaatcatgaaacttattaacttctttaactaatgaaattgtttttttgtaagaataaaaactttcaaagaaaaaagcttgtgcaaagtaagttatgaacattaatgcaagaacaaggcctaatgttatgctaaatagccttttagataaactacgcctcatttatttaacctcaaatttatagccgctgccacgaactgtaattatataattagatttatctaacagcttttcacgaagtcttttaacgttagtgtcaactgtacgtatatctccatagtagtcaatcccccaaacattatccaatatattatctctacttaaagcaattccttcattagtaactaagtacattaaaagttcgtactcttttggcgataatattatttctttgccatcaatttttacttcatgcgaaagtttgtttatagttaaaccgttaaaatcttgaaagctcgaatctaagtcttctctagttctttttagaagcgccttaactttagcgattaaaactttaggactaaagggttttgtgatataatcatcggctccataatcataaccttgaagtttatcctcttcttcaccttttgcagtaagtaaaactacaggaacggtagagacttctctcaatttttccaacatagttaatccatccataacaggcatcataatatctaaaagtaccaaatcaattttttgtgtactaaatacaaataatccttcttcgccatttgaggcttcaaaaacattaaaatcttcttttattaaataatctctaagtaaaaatctaattcttagttcatcttcaacaattaaaatagactttctcataacatttcatctccttatatgtgaacgtgtaaattcatacaatgcttataataacataataccttacaaataaggcaattctattacaattatatatcacattgtacaattttttgtgttctaagcgcaatataatattgcaaaaataatcctttatcaaaattctaaaaatattataagaattttggccgtaattgtgaattgcaacatacatattatattaagtttagcatataaagatcaatatgtatgttataatagtaaatctacatttaagattatagtaaaacaagatctaagcaggactaaaatcttcaagctcaattacaaggtatatattaaattcattatagtataataatgtaaatactctcatatattatattggataataattatctataaataataaatttataatgattatcatgaatttggaagaaataaaaaagatttttaagaatatacgtcacacatcttgcatggataataatactaattttgaattggaacatatatttgtgttattatatagatgtatagattatttttgattatagaaatttacttttgttttgtgatatgattatgaatggcatatttatactttaaaacgtgattagcattactagtgttattttaaatgaaaagatcgcaaagtatcaggatatttgatatttaattaggagaatagtgaatgataaaattaaattttgatgtgaagagacatacacttgaaaatggcttggaagtaataactattaagaaggatactcaaattgcatctattaatataggagttaaggtcggtgctctatatgagaatatgaaagaaaaaggtataagtcactttattgaacatactttgtttaaaggaaccatcaatagaactggtgaagagttaaatgatgaattagaggctttaggtggagaatataatgcttatacagattatgatgttacggtttatacgattagctgcttgattgaagaatttaaaaaagcaacagagcttttggctgatatgattgtaaatccaacatttgataaaaatgaaatagaaaaagaacgaggtgtaattttatcagaaataaggatgagcaaagatgatatagaggattttagttttaaaaatgtaaataaacttgcatttaataaaagtgctttgaaatatgaagttactggacttgaagagaatgtttctggatttaccagaaagaaattgatgtctttttataaaaggtactatacaccaaaaaattctcttataactatggtatcgcctttagagcatgatgaagctataaacttagtgaaaaactatttcagtcaatgggaagggcaaaagccggaacctataaatattataatagaaaaaaataaagaaataacaggaataagttataagaaggatatagagcaaagcactatagtctatttatacaccttcaatgatttagaaaaatcaaatgaacttccactaagaattttgaatcatagacttggggaaagttcgaattcacttctttttagagaaattagagagaataggggattagcttatgatatttatactcatttagaaataaccaataatataaaaactctatatatatacacagcagttagtgaggaaaacattgatgaagctaaagccgccattgaggaaacaataaaaagcgtagttgatggaaagattcaaataggagatagagatttaaatataatgaagaaagtccataagacagctgtaatatcaacattggaggattcatctgagttatgcaattacatgcttcatcaggcattagagggcgaggacatatttgaatttgttaaagatatggatcgattaaatatggtggatatattaaagattaatgaagttggaaaaaaagttttaaaaagcccaacgatacacatactaaagtctaactagtaaattaaataataaaaaaggtgaaagttttaactatggcaaaaatgacgaaaatagaaattcaaaagagaaacaaagaaagagttaacttattcttagatggtgagtatgcattttctatttcagcagaactggtttataaagaaagtcttaaagtaaatagtgaaataaatcctgagaaattgaggacactagcagaaagtgaaaactttatgaggtgtaaggaatctgctttgagaataatagaaaaaacatataaaaccgaaaaagaggttagagataagctaaagcttaaagagtatgacgaatcatctattgacaaagctattgaatttcttaaaaaatataattttataaatgatggcaattatacaaaaatttttataaaagataaattacgatcaatgggaagtcagaaaataaaatatacattgcttcgcaaaggaatttgtaaagaaatcattgatgaggaattattaaatctagataaagaaaatgaaaaagatgttgcatttgatatagcacaaaaaaaatataatttaataaagaataaagagaccgatacttataagatttcaggaaaattatataggtatttaatttcaaagggatataatacagaggttactagtcaggtaatcaaaaaagttatggctgtagacgtggatgatttttaatagtgtttttatatttcgcccgttgaaattcaaagcgcatattttagatgtatttttaatatgcttatgttctcatttttgatataattagaatatacattataatagggtgaaaatattatttgtggaggaaaaattatgaatgaagataaaactatgttagtagttaatggaatcatctcaggatgtatccaagtaagtatcataattgcactattagtctttcctagtataatatttaattccacgtcagttcactcatttacagaaaatgttcttaaacaagaatattcaccaagtgaaaatagcaagattgtaaatagtaaattatttaagaacatacagtcaattaaaaatgcatcatcaaaagaaattattatttataatggagttactatagaagacggtattaaatcaaatgaagaaattgataataaagcgctaaaattaactcagggtgctaaaactgatagggaacgagcaaaaatattatatagttggattggaagtaatataaagtacgataatgaaaaggctcaagaagttttaagtggaggcgacactgaaaaaatgccagaaagcggtgcaataccagcgttcagtagtagaacaggtatttgctttgataaggcatgtctttatgtagcgatgtctagagctgctaatcttaaagttaggcttttgggaggccaagcctatgatggagaacaatatgttggccatgcatggaaccaagtttatttagaggatgaaaataaatggatcaatgtagatacaaccttctatgatggaggaaattattttgattccaatttatttaataagcataatgtagaagaaattgctggtgaatggtaaattagtttgcttttttaaattttgaaataataagatctatggccttttcacaatctttgtcattaggatctattgaccatgctaaattaaagaaacgtaaagctgtattaaagctttctttcatgacatagcaatatccaagattaaaaaagtatttactttcatgcttaagagaaattgctttgttaagcataattattgcatcatcaaattttttgagtttaattaaacaaactccacaattatagtatgaacaagccgtgtttaaattttctgatgcagactttttataaaaatccatggctttttcgtaatccttcatattgtaaaatttgtttccttcagtaaaataattcatttgtgacctccaatagcaaaaatgtaaatattaacttaaattctttataattatagacaatactttatattagtatacatatggaagtatttattaaggcataatcaaaaaaataacaggccagtatgcattggggattattttctttaatgtgcctaagctttaaaattatataaccaatatgtacattgaaaaaacagagtaggtgaaataaatatgataaattataaaattggtttagatataggatcaacaacagtaaaattagtggttcttaataatgagaacattttaatatatagtaaatataaaagacatttttcagatataagaagtacaataattgacttaataaaggaatgctatgatgaattagggaatgttaactgcaaaattaatataacaggatcaggaggattgtcagtatcaaaatggcttaatcttggttttgtacaggaagtaattgcatgttcaaaaacagttgaaacaattattcctgagactgacgttgtaatagaattaggcggggaagatgcaaaaattacatattttagaggtggaatagagcaacgaatgaatggaagttgtgccggcggtactggagctttcattgatcaaatggccatattattgaatactgatgcaatggggttaaacgagtatgctaaagaatataaagtaatatatcctatagcatcaagatgtggtgtctttgcgaaaacagatgttcagccattgataaatgaaggcgctaaaaaaagcgatatagccgcatcaatatttcaagctgtagttaaccaaactataggagggcttgcatgtggtaagcctataagaggcaatgtggcatttttaggaggtcctttatttttcctttcagaattaagggaaagatttattgaaacattgaatttaaaggatgaacaaattattgcaccagaaaattctcaactttttgttgcgatgggagcagctctattgtcaacaaaggaaaaatcaacatctttaaaaaatatagtagataaaatttctgatatttctaatataaaagatgatactgaaccaagacttgaacctttatttaaagataaagaagattacaacaaatttaaagagagacatgataaaaatgttgtaaaaaagggagagttaaaggaatataaaggacaagcatttttaggaatagatgctggttccacaactactaaagtagcacttataggtgaaaattccgagcttctatattcttactatggaagcaatgaagggaatccgttaaataaagttgtagaaatcatgaaagatttatatgaaaagcttccagaaacaatagagattgcaaactcttctgttacaggctatggagaagcgcttattaaagcagctcttcatatagatataggagaaattgaaacaattgcacattataaggctgcagatcatttcttgccaggtgtagactttatcttggacataggtggacaggatatgaagtgcataaagataaaaaatgatgcaattgacggaatacttttaaatgaagcttgttcatcaggatgcggatcttttattgagagttttgctaagtctcttgatatgaaggtagaggatttcgcaaaagaagccttaaaatctaaagctccagtggatttaggttctaggtgcacagtatttatgaactctagagttaaacagtctcaaaaagaaggagctgaaatttcagatatatcagctggtctgtcatattcggttataaagaatgctttgtttaaagtaataaagttaagagatgaaaaagacataggtgaaaaagttatagtgcaaggtggaacattttataatgaagctgtacttaggagttttgaacttatatcaggccgagaagcagtaagaccagatatctcaggactaatgggagcatttggttgtgctcttattgcaaaggaaagatatattgaaggagaaaagtcaactttattacctagagatggaatagatcaatttgaaatgacagcatcatttagaagatgcggaaagtgtggaaataattgtttgcttactgtaaataaattctctacagatgaggagttcatttcaggaaataggtgtgaaagagggcttggaatagaaaagtctaaggaaaacaaactaccaaatttattcgattataaatataagagaacatttgcctataagcctttaaaagaagaagaagctaaacgtggagttataggaattccaagagttcttaacatgtatgaaaattatccattttggtttacacttttaactaatttaggatttagcgttaaattatcagcaccttcaagcaagaagatatatgaacttggaattgaaacaattccatcagagtcagcttgttatccagcaaaattggctcatggtcatataatgaatttaataaatagaggaattaaaaatatattttatccttgtatatcatatgagaaaaaagagtttatggatgctcaaaatcattacaattgtcctatggtaacttcttatccagaagcaataaaaaataatatggatgaattaaaggaaaataacattaatttcatggagccatttttatctttggacaatgaaaaggaacttataaaaagaatagtggatgaattcaaggcatttgacgtaagcatgcaagaggcaaaaatagcagtggaagaagcaagtaaagaaagagagagtttcaaaaaggatattcaaaaaaaaggtgaggaagttatttcatacttaagagagaataataaaaaaggaatagtattaagtggaaggccttaccatgtagatcctgaaataaatcatggaatacctgatataataaattctttcgatatggctgtgttaacagaagatagtgtctctcatttaggtatattaaaagataaacttagagttgtagatcagtggatgtatcactcaagattatacagagcggctgcttttgttgctgatgagccttgtgtagatatgattcagctaaattcctttggttgtggattagatgcagttactacagatcaagtttctgaaattatatcttcaaaaggaaagatatatacagttttaaaaatagatgaaggaaataatttaggagctgctaagattagaattagatcattaaaagctgcaatgggcgaaagagaacgaaaaaattataaaccagttgaagaacaagtagtatacaaaaatccagtattcacaccagagatgagaaaaaaacatacgattttatgccctcaaatgtctcctattcattttgacttaattgagacagcagtgaatgcatcaggctataatttagaagttttaccatcaatggacatgaaagctgttgatgaaggattaaaatatgttaataatgatgcttgttatccatcaattatagtaatcggtcaaataattgaagctttaaaatctggaaaatatgatttgaataatacttcagttataatatctcaaactggcggtggttgtagagcaacaaattatattggatttttaaagatggctttaaagcatgctggatttgaacaagtacctgttatatcgttaaatgcagtaggacttgaaaaacaaccaggttttaagattactccaaaattacttcataaagctattatggcattagtatatggagacttattcatgagagtattgtataggacaagaccttatgaaaaagttaaaggatctgctaatgatatttataagaagtggaatgaaaaagtaaaattaaatttagtcaatggaagcaagagagagtttaataacaacataaaagaaatcattcaagagtttgatgaattaccactactaaatgttaaaaagcctaaggttggtgttgttggagaaatattggttaagttccatccaacagcaaacaatgatattgtagggattttagaaaatgaaggagcagaagcagttgtgccagatcttttagatttctttttctactcagcatttgacgcagactttaaagcaaaatatttggcaggaagtaagctttcaaaaaatttatgtaatatggctatttcgtatattgaaacatacagaaaaactatgaaaaaacaactagaaaaaagcgttagattttctaagccaaagcacataaaagaattagcaggtatggcatcacctatactttctcttggaaaccaaactggagaaggttggtttttaacagcagaaatgatagaacttattgagtctggtacaagtaatatagtgtgtcttcaaccttttgcatgtttgcctaatcatgttactggaaaaggtatgataaaagcactaaaagaaagatatccaaaatcaaatatagtggcaatagattatgatcctggtgcctcaaatgtaaaccagttaaatagaattaagctaatgttgtcagttgcctttaaaaatttaggcgatgaacttaaatatcataaaaaacaaaatgaaagtattgtggagcagcaatttcataatgaggcaggtttaacacttgaagacaatatttaattaaattgtgttaaatttaatgttttagttagcataatcatgtatttataatgcataatgtacataatttataattagcgtacattgtgcattaaagtttttgaaggaatttacatgtaattgtttttattacaattattgttttatgttagttttagtttatacaatggtgattgtacagttttataggctattaaaataatgtgcaatttattaggaggtaatagatggatacgcaaagtaatcatcaagaaaaagagaacattgaaaataaaaaatttaaaccgctagtattctttttgggaatagtatacataattatatttctatgtataagtacgcctctagtattattttttggaccttatgaaaatacaagaaaagtatttgtttcaacattacttggaacaagacatgcgtatctattaactgattttatgtctcaggaagaaataaataaaattttaggagttaacaaaaatacagaagaatcgaaagatgatagtaccaaaaatacagaaacagatttaaataaagtaaaagttaaatatactagtggaaatgaaataactagatatgatatacatacggacagatataatggatatatacttgaaataaaaaatccattaggagttaaagttgcaatgacaaaatatttaggaaaaatgggacagaaaaccagcgaaatggcagaagagaataatgctattgcagctattaatggtggatcttttgtagataagtcttctgatggaacgctttatgcaggaactggggcagagccaggaggatttgttatatcaggtggaaaagttgtatatcctaagagcaatgtcaataggactaatgttgaaaatgttatagcctttactaaaggtggtcaacttattgtgggagatcatactcttgatgagcttcaaaagctaggagtacaagaagcaatgtgttttagaaggcctaatattattataaatggtaagcctcaagttaaagataagacatctgatgggcttaaccctagaactgcagtgggacaaaaagaagatggtacagttatatttttggttattgatgggcgaaaaatcacagcgcctggagcaagtttgtatgatgttcaagaaataatgttagatagaggtgccattaatgcgggggctcttgatggtggttattcttctacaatgtactataagggagaagtgataaattctccaaatgcttgggatggtgaaagatctgttgccacagctttttacgttgagtaaaataaattttatgaaaaattattataataaatagtacatataacacaaaagtagaagtaattttgaagtatctttgtaggagaggatagttaatgaaaaacctgataagaatagtagtatggacacttgtagcaatagtaattcaacaaggtatatttttatatgtggaaaatatatatttagcttcagatgtaaaaatacaagctgaaaaagttgaagaaaaggaaacgccaaaagataataagcaaaatgaaattaacattaaggatggagtttctaaagcatcagtatcctcagatagcagatttgttgcttatatagaaaatagtaaacttaaggtattagatagcaatgataatagtgaaaaagaattccaatgtgatgatggcggagatgtagtgttctataaatggttaacaaatgaaaacaatataatagttatacaaaaagtgcaaaaaaaaggaggagcttattttgagccagtctcttttgatgcaaagaaaggagaaacacgacaacttgcagattttaatttaaatgagttgaaaatagatacaaggaatacaagcgataaagtaggtaatgtagtattttctactgcaacacatagtctttacataaaaattgataaagcgaatggaaaaagtgatctatattatgctaatgtaatgaatcaattagagaaagtcagatcaaataaagaaattggaaatatagtggttcctactacaagtacaaatgcggtaatggaaatggggaatggagcaaccatattaaatagtcccaataacatagaaataccaaatgcaaaagttataaaaatactaggcagtgatattaatgacaatgtatattttggtgaagaagttagcggcaatattactaaaatatattattcagcattaaacgaaggaaaaataaaatggaatatgctgattttaccgaagccagtaagtaaggaagatataattgtagattattcgggaaaggtttatattaatgataaatctgctggaagtgttttagaactgattagtaagaagacaattaaatatgaaggagatcttttgcaatcttattctaaaggcattatttctataaatggaaataagttaacaaagtacgaaattggagaaaacagaatttcgattaagcaataatatgcacaataagattactttgctaaataaccatgattttgataatacaaaaatataagaaatttttgtatttaaggatctatcataataagatataataattcatataagttttaaaagaataaaatataaaaaaagtcatataattaaatttatgtaaatataaaatcaatggtaaaaggggtggaacttatggataaaagtaaaaaaaataagttaattggaacaggagttattgttggatctatggcagcattaagtggtgctatagcaatgggtaagagatttagaaataaaaagataaaaaaaatcattgatattaagacatattcaacaggtataataaggagctttggtactttatatttaaatgatgaaaagcaaaaggtgccaggagatttcttgcagttcaaagacattacttcatttgcaggccaaaaaatagaaattaaagatactgataaagatgatgattataaattatcttggatagagataaatgatgcaggtaagaaattattgatttgtgatagaaatattttgaaaaatatttcatggaatgaactaaatgatcaaaatttagtttttggtaaagtagtaatagtagaaggagaaaaatacattttaaggctcttaactggatatagtgaaaagaaaaattataagaataatgaatgggataagtatatagtaaatcctaataaaattgatggacttccaccaagtgaagattatgatgtagataataatataaagaaatttgatgatgagaagattaatggaaataataatgctttatggcattggtataatttctcatctttcactcaaagcgaaggcttaagaagtgaaaaattctgcataataagaggatattattcaacaacatattctaagcagtcagttaaggacttaaaatatgaaactgtagggtataggccagttttagaattgattgaataaaatataagcgtgtgagcacttatttatagtagcttatgcgcttttatattaaaaatagatactaataggaggacaaatgaaattaacaaatttaagcaacagaaagaaagggataatatttataactgcatctgcatttggatttgcaatgatgtcggcatttgttaagatttctggtgatttaccatcatttcaaaaaactttttttagaaatatagtatcactaatggtggcatttgcactaatatcaaaacacagaggaaacttttttggacaaaaaaataatcaaaagacattattgcttagatcaatattcggaactttgggaattttatttaatttctactctatagataaattagttctatcagatgctaatatgctaaataaattaagccctttcttcgtaattattttttcggggatatttttaaaagagaaagtgaatataaaacaaattatagcaataattatagcatttataggaactttattcataataaagccttcattaaatttagaaataatgcctgcaatagctggaattttaggtggtgtcacagcagcagcagcttatacatgtgttagatctttaagtggaaaagaacatccagaaactattgtgttctatttttcttttatttctagtgtaattacttttccattaatgataatatactatgaaaatatgaatataatgcaacttatctgtttgcttttagctggtatttttgcaagtcttggacaatttggaataactttagcgtataagtatgcaccagcaaaagaaatatcaatattcgattatacaaatataattttttcagcaataataagtttatgtttatttggaatacttcctgattacttaagtcttataggatatgttgtcatctttagttcatctttatatatgtttttatacaataaagattgattataattaatataaaaaaatattagttaaggaaaaaaatataaaatttattaataaaacttgacaaaagtggatagatataatattatctaattgagaatgattttcaaaattatttaaataaatagggagtggtacaagtaatgaaaatagtatattggtcaggaactggaaacacagaaaaaatggcagaattaattgcaaaaggaatcatagaaagtgggaaagatgttaatactataaatgtctcagatgtaaatatagacgaattactaaatgaggatatacttattctaggttgttcagcaatgggagatgaagtattagaagagtcagagtttgaaccatttatagaggaaatttcaactaaggtatcaggtaagaaagttgcgcttttcggttcttatggttggggcgatggaaaatggatgagagattttgaagaaagaatgaatgcatatggttgtgttgtagtagaaacaccattaatagttcaaaatgagccagatgaagctgagcaagattgtatagactttggtaagaagattgctaatatataattaaatttggtggtgatatgatatgaaatgtctagatttttacaaaagattagatttgatggatgagaaggaatatatagaaaatttcttggtatataattcatcattagttatcgcaggagttaaaccggctgtaactataaatttgaaaaaaagtaatgaaaaaatgtatattggctggaatgacttcggaaaaaaatttataaagaatataaatttaaaattcatagagttaagagaaaataatgattgtatgataataatgatttatgatgaaaatatattagaaaaagagttaaataaaaaatcacatatagattttttagcaaacatagggtatccttcccaaataaaaatagatagatatattgatacattaaaatttagatataataaatatcactgccctcatgagcttggattattcctaggaataccatttgaagatgttaaagattttatggaatgtactactaaaaaatgtttactatgtggatactggaaggtatataacgatagtaagaaagcaaagatgatttttaacacatatgacacagttaaagaatatacaataaataatatgcttgagggaagtttatcgcgtgacctcgctttaagtataaaaaactccttttataaaaatgctttatacatttgattataaaaattgtatttagcaaatagataatttagattattaaaattaattaatataattaaaaaagttttatcaaaattttgaatacaaaataaaatattcttggtaacgcacactaccatgaatgtgagtaattaaccaccaaaagtttggtatttagtgaccacacaccactaagtatcatagttaaaaagatatttgttaatgtccacacaccattataaatatcttcataaatagtacaaacgaacaacttctatttaatataaaaagtagatacatttcataaaattcaaatatgacccacaaggtttgcaaaaactttgtgggtctaaaattttaaaaaattattaattattatcaatagtttagtatcaaggttgaatttgttttaataaatttttacaataatagataattaaagtataatttatttaaggatatttttctgtaaaatagtaaaaaatatagaaaacatcattaatggctaactaatttaattataattttaacaatatatgggcgaaatcaaagatttagtagataaattatttatggtatagggaattttgaagaataaggatgtgagaaaatgaatattatgttcaacaaactttttgaaatagataaagttagtgattcaattgaaaaaatcaattttagggaagcagtaagaggaataataataaaggataaaaagattctaatggtacattccaagaataaggattataagtttccaggaggagggatgaaaaaggatgaggggcatatagatgctctgaaaagagaagtagaagaagaaactggatatgtttgcagtaaaattggtgatcaacttggaattataacagaaagaagcaaagataaatatgttaataatagagtttttaagatgatctcttactattacttagcagaagtatcaaatgtaaggaaagctcaaaaattagatccatatgaggctaaattaaaatttaggccagagtggatacaaatagaagatgctattaataataatgaaaaaataatatcatcaggagtagaaacaattccaaactggatttttagagaaacttatgtgctaaaggtgataagagattatataaatagatttaataaaataacataataattaatgcgtatatattgctgtaataaatttatatttaaagttttagtaagtgaaatactcatatgcaatttaaatgtagaaatttaattaaagaatatatattaaaaaggctcgaaagaaatgtaagaaattttatgaattaattcatattgcacagaatattaataaaaacaagtgttagttaaaagaagaataatctaaacaccttattttagtgataaagtatgtagagtaaggtggtgatttttagtaataagtgataagattataaatagttataaaaattttatatcaaagagagaatgatatatgtttatgaaatattaacgatatgtcattctatttgtgtgtttttataaaaaatgtattctaaattattgattttgggatagcgtttattagaatacattatggaagatggaatttattattgaatatatgagcattaaattgttggagtagcggggagtgatataaagacgaatatggagatatataatgtgaattgaaaatggacaagggtaatagctataaatatatagctttaatttttgtttaacgttaacagaaaaaactagtaatcggggtgttttactagaaggaagaaggatattgtgtgttaataagaaaagatgttttaaagttagcaatacctataatgatagagcaaacatttgttatgttattaggtacatgtaatacaatgatggcaggacatattggtgaacaagctgtatcagcaataggaatggttgattctataaacaatatgttcatatcattttttgcagctttatcagttggtgcaacggtagtagttgcgcagcagataggaagaaataaacctaagaaagcaaatgaaacagctaaacaagctattgtatcaggtattttagtatcattaattataacattgcttttgtggattttcaggattaaattaattaatgtactttatggttcagcagaagaattagttaaaatcgatgcaaaactatatttggagtttactttgcttacgtatccatttatagcaatagaacaaattgctaatggtatactcagaggatgtggagatacaaaaactcctatgcaaattacaatatttatgaatgttataaatattgctttaggatatacattgatatttggaattaatacactgagcataccgtcatttggaatagctggtgcagcagtagcaattgcaattgctagacttattggtactttaattataatgctagttttatttagaggaagtaaaattataaaattaaaaaaaatatttccatttaaatttgatatggaaatacagaaaaatatatttaatataggaattccagcgggcatggaacaagtgatatttaatgcaggaaaattaatagttcagatgtttatcgttacaatgggaacagcatctattgctgccaatgcaatttcatcatcaattgctataatgataaatgttccaggaaattcactttgtttagcagcaacaacttttgtgggacagtatgtagggagaaatgatattaaaggtgcaaagagtacattaatatacttgactaagtttggtactatttgcttagtatctttgggattgatttttatacctatatcaaaatggttagcatctctttatacaaatgttccagaggtaataaatatatcagcaacattaactagaagcaacagtatagcattaattgcttgggggatatctttcatactttcatcaggccttaaaggagctggtgataccagatatactatgctaactgcatttataggtatgtggatatttagaatatttgcaggttatattttaggtattgttctaggaattggtgttttaggaatttggattgctatgtatattgattggattgtacgcggacttatgtactgctttaggcttagaggaaataactggcttaagcatagaatttctgactaaaatagttaaaagaagttatctaagaataggaaaataataatggatgattaacattaatttttattatttttagataacttctttttatatagttataagaaatttgcaaagatattaaaaaatagttataatttaaaagaaaatgtttacaataataactgatgagattataataagtaatagagtgtttaaaagtttaaattattaaatattaatctaacttttaatacaacctctaatactcattaatctctttacatataattggactccactttggagttcttttattatgttcaagaaatattaagtacataggagaagaattatgagaataaggtttggctatgtagcaatttcaatgaggttgggtaaaaagatttctagttcaagcacagttacatttacaaattataataaaattatttctgaaaggaataaattagataaactaaagagcataacactatctaacttaaatgatctagagaaaatacttaattataatgtggagaatcaaatacacttttatagaataacatctgctttaattcctctagttactcatcctgatgttggttattggggacatagagagatttttaaaaaggattttgaatttattggaagaataattaggcaaaataatatgagagtggatacacatccagatcagtttaatgttttaaatagtgcaagtaatgagatcgttaaaaattctatcagcaatttaatgcgtcaagtagaatggtttgaggatcttggatatttacatggaaaaatggttttgcatattggaggagcaactggtggaaaagagtcaggaataagcagattcattgataatttttctctgattccagaagaaataggatctaaattaattcttgaaaatgatgataaaatatatacggcaagggaagttctagatatatgcaggactttaaatattccaatggtgttagatgttcaccatcacaattgcaataataatggtgaaaatatagaggacttacttgaggatatttttaatacatgggataatgaatttttcccgcctaaaatacatttttcaacaccaaaagaccacgataaagatagaaagcatgctgattatataaatgcggaggatcttgttgaattcttagaaaaagccaaggttctagatagggattttgatataatgctagaatgcaagcagaaagatgaggcactgtataaattagtaaaagatataaaagtcataagaccacagtataaatggatcgataacagcacttttgaattataaaatagttttagcaactacctagaaaatttaatattttaggtagttatttttatgaatatatatttgaatttagcatcattgataatattctgatataatagatatatatgttttgggaggtaaataataatctgggaaggaggaaagtattgaattgtgctgctttataacataatattaacaaaaattattccaatgggattcatatgaagaaagaagggatttattgatgagaaacgttattagaaatctattacttggattaataataatatcagcaataatgggacaacctgtttttgcagcagatgatgatttaaactcatatgtatataaccatttagaaaattgggacacagagtttcaaattgattattataaatctgatgtattagaagtggtacaaaatattgcaaaagatgatgattacttaatgagatcactagagaaaatggtctatgaaagagttggagataaagcaacattaaaggttacttatagaacaactaaagatcaagagttatatattaatcaagagctaactaaaatagttaattctataactaccaatggaatgagcgattttgataaggtcaaggcaataaatgaatatttaataaatagatttgaatatgatgatagtcttgtatctaataatgcctattctgcattgacaactggaaaaactacatgtcaaggttatgccatgactgcttataaaatgcttaaattagcaggtgtagagaataaaattattattggaaatttagatggcgttcctcatggatggaacttagttaaattaaataataagtggtaccatttagatgtcacaaataatgatgcattaggaaataataaatattttctaagacaagataaggttctaaaaaatgatggatttacatggaaagaaagtgattatccagaatgctctgaggattataattatgagaataataaggcaagcagttatgctggattattatctgagcttaagtcaaataaagatggtaagtggaatttagttaattctgcgtggtgttttatggaaaacacaggacgttatgcaactggatggaatataatagataataattggtattacttaggcaatgatggcataatgaaaacaggatggatatactctaatggaaaatggtattattgttatcctggaagcggggctatggctcttaattccgttattgatggaaaatatagagttgattcaaatggagcatggatatcatagctgtagcaattaaacaataaagtttatattgacaaaagcttaagttttttgtacaatttaaacaatttaatatatcgcataataaggaaagtaatttattatatttctttattctagattttcaataaaagcaatgaaaagaataagtagaaattagtgatgccatacagaaagttaccggttgatgagaggtgcatggaagctggttttgaatacatcttagagcttcaagctgaaaaaagtttcttttgagtaggtgatgacggaaccctgcacccgttatagtgctaaagtataaccaaaattttggcgtacttgaagaggttaatcgtgtgagcgattaatgaattaaggtggtaacacgggagttatactcttgtcctttatattttaaaggacaagagtttttttgttgcaaatattgaatcttgtaacgcttacttatattaaaaataagaaatatttaggagttaagaagatgaaaaagaatactgaagaacaaattaaaattataaggaaaggagttgcagacataattagcattgatgatttggagaaaaagattattaagtcggcaaaagaagataaacctttaataattaagttaggtttagatccaactgcgccagacatccatttaggtcatgcggttgtattaagaaagattaagcaaatgcaagatttagggcatcgagcagttataataattggggattttactggtaaaataggagatccaaccggaaaatctaaaactaggaagcctctgaccaaagaagaagtagtagaaaatgcattaacgtatcaaaagcaaattttcaaaattttagatagagataaaacagaaattaagtttaatagtgaatggttatctgaactgtcatttgaagaagttttaaaactggctgcgactacaacagttgcaagaatgctagaaagagaagattttaaaaagagatataattctaatactcctattggaattcatgaatttttttatcctctaatgcaaggttacgattctatcgcattaaaggcggatatagaattaggaggaactgatcagacatttaatattcttatggggagaacattacaaaaaaatgctggaatggagcaacaaacagcaatatttatgcctatattagaaggactggatggaaaggaaaaaatgagtaagagtttaggaaattatataggaatacaagaatcagcagaaataatgtttaagaaagtaatggaaattcctgatgatttaattataaaatattacgaacttgctaccgatgagcatccagataaaattagaggaattaaagaagagttggataatggcaaaaatccaagagatgtcaaatttgagcttgcaaaaattataacaagattatatcacgcagaagaagaaagtaaattcgcacttgaatattttgaaaatgtatttaaaaataaaaatatacctgatgaggtgcctgaaataaatatatcttctgaatgtagcttgttagaagatgttggaaaagttcttgttaaaagtaacttaataaaatcctataatgaatttaaaaggcttttaagtcaaggtggagtatatgtaaatatgcaaaaagtatctgattttaacaatataataattaaaaatggagatataataaagttaggcaagaagaagtttgttaaaatagtaaagtagctaaaagtgtattaaaagaattaaatgaaagaatatatactatattaaaagaggcactcaattgaactgcctcttttaataaattaattcataaagaattatgactgcttttgcttttctatgtaattttcgtaccaattattaaatagaactttaaatgaagcagcaactggcacagcaaggagcattcctaataacccgcctacattgccaccaattagtatagccatcattgtaaataccgcatgtaaacctacactatttccaacaattttaggggctagaagattattatcaatttgttgtacaactagcatagcaactatggcgtaaactattcttataggtgcaccacttaaaagtcccataatagcagcaagaatagtgccaataattgggcctacatatggaatcatattgcttattcctgcaattataccaattacaaaagcgtagtctattccaacaattgaaagtgctatcgctgataaaactccaacgaaaaaagcttctagcaattgaccgcgcaggtacttagcaaagacttcatgaacaactctaaaaacgtaaataattttactgcctaaaatacttttaccaaatactaaataataaagcttattccatagtcctataaaatattcagaatcctttagaagatatatactgattacaagtgcaataaaaaatgttgcaacaccacttccaattgacattatatatgaggtcatattacctaagttgctttcaacatatctttgtaaatatataattccgctaataatataaggttttatattatctataaaagaattatccagcctatctaaagtcccttttatggattcagttgaaaaggaattactctttaagtatagggaaatgtgttgagtcatatttataatagtagtattatttgatatctgaccgcctatcataaaatagattcctaagattaagcctgaaaatataccaataattaagacatatgtaatcataattgctataattcttcgagtagatgccttctctaatttatatagtttgttctgctttagaaaagtttcaatgcttctagttataggatataaaagatatgctattatgataccgaaaatcagcggcttaattaaattagttaaatatcctagaaagtcaaatgcagatctaaataataatcccatatttaaaataattaaaaatgctatatatagtataactgctgtaataactatatatatggaatacttgaataattttttatcaaattcaattttcatataacggtactatctccttattttattttaacttaatttactattatatgaattatatcatattttaaagcaaatatatcatataaatatttaagtaaaacctataatgggataatagataactttttgttaaaacatttcttaaagctttcatccatttctacaggtaaactatcttgcatgtatttaacactactctttggaagtgttaacttaaaagtatctttctggtttataattgtgacttcggataaactattataaaaatacttatcaattttatgagcaagacataatattattgaaatttttttgcatattagaatctcctcttttctaaggatatttttatattcatctgataatttgtaatcaaatttaccacttagtgctatggcgtaaccaagcattaatatttgtttatgtgtaagtcctgaaattaaggagttaattatgatatataggctgtgtttataagcatgttttatggaaatacttatccctaaatcatgcaatttagctgctgcaccaagaagtttatattctaattctaaaaattcataatttggtttttcaaggtatttaaaaaatacaagagatagatcacgtattttttcagcatgtgaaatatttaagtcattatttgttaaaatattgttcaatgagtaatctaaaatatcaagattatcaagatctttattcaagagtttttcgtataaaacaccttcacggattccatattgactaattctaaaagcaggacaattgcaatagttcataagcattacaagtgccgagaaaggtgcagtaaatatgtcagatctttctctaggtaatccctttaattttaccttttggttcgtattaagattgagaacatattcatgaattattttaatttcatcaaaaagcatagtataattatggagcagatcaagtggatatttaataaatttcttatgaattttaccaatcgaacgagctgttccgccaattcctattaaaggcaaatttttagcaagttttagccaaggcaacttatcaaattcattaaatataaatttcttaaatgctgaaatagtatttttatctgctggcacatcaaaaggaaatagcttagttagtggtatggatccgaggggcaaacttactccattaagtatttttttatctttcattaaagtgatttccatgcttgaaccgccaatatcaataagtaaagcatcctttatatccatggtagctttgattgttatatatccataagctgattcttcaattccactaagaactctaatatctaagttagtcttatctttaaccaaagataaaatataatctctattttttgcacgtctgattgcctcagtagcaactacaattatttcgactacatcatttttctcgcataaaatcttgaagaattctaaagtaattaataacttacctattccttcatttgataaattgtcattttcatcaataaactgaccaagtcttgtcattcttttttcttcatcaattattttaaatgaattattctcatatatttcatatactagaaccctcattgaattggaacctatatcaataactgcgatatttttcattgttcactcctcctctatataaaaatatgataaaaagttaacttgtatataataacattttaacttaaagttaacaaaaatattagattatattagtatacatttaaatatattacattattcaatgtgtatttaaaatactatatttacaaataattaaattaagttgaaaatgattagcttataggatgaggagaataattatggatgaaaattatacatatgataattacgaaaatttttttaatcgtgaacttagttggttggaatttaatcaacgagttttagatgaagctaaggataatacgaaccccttattggaacgattaaaatttttatccatatcaagttccaatctcgatgaattttttatggtgagaattggatcattatacagtcaaattcaagcaggatttgatgaaagagaagtttctggattaacaccaagtgaacaaattagtaaaatactttatagagttagggagatggttaaggaccaatatcatacatatgagcatttatatgaccacttaggttctagaaatataagaattttcacgtatgatatgttaaatgaagaacaattagaatttataaatgactattataaaaatatattatatccagttttaacaccgatggtaattgattcaggcagaccatttcctttgttgttaaataaaacattaaatataggggttatattaaaagaaagtaagagtgaacaagaattgtttgctacaattcaagtaccatcagttttagggagattagttcctataccaggggggataggtgaaaactttgtattattggaagatgtcataaaaaaccacctaaaggaattgtttggatttaaagtattaacaacagcgtgctatagaataactaaaaatgcagatttaagtttaaatgaagaaggcgcagaagatttgcttgaaacaatagaagaatctcttaaacagagaaggtggggacttgccgtaagattagaaattgaagaaacaaatgataccaggattataaataaattagaacaagaatttgaaatttcggaggatcaaatattttgtataaaagggccaattgatttaacatttataaataaattatatagtattaagggatatagtgaacttaagtttgagcaaataaagagtctgcaagttaaggaattacaagaagaggatatatttcaagaaataagcaagaaggatatttttctacaccacccatatgaaagtttttcattagtagtaaaattagtagaaactgctgctcaggacgaaaaagtactagctataaagcaaaccctatacagagtaagtgggaattcacctataatagctgcgctttcaaaagcagcagaaaatggaaagcaggtaacagtattagttgaacttaaagctaggtttgacgaagaaaataacattcattgggcaaggcagcttgaaaaagcgggatgtcatgttatatatggtgtgattggattaaaaactcatagtaaaatattattgattgttagaaaagaaaaaaaaggtattaaaagatatgttcatctaggaactggaaattataacgatgtaacagctaaattctatacagatattgggataataacatcaaagcctgaatatggagaagatgcatcagttatatttaatatgctttcaggatattttaagcctgaaaatatgagtaaaataactattgcaccgtacggattacgaaaaaagttggagcatctagttgaaagagaaactgagcatgctaaaaatggaaagaaagcaaaaataattgcaaaaatgaattcgttagttgatagaaaacttatgatagctttatataaggcatcacaagctggagttaaagtagaacttatagttagaggaatttgctcattaagacctggagttaaaggcttaagtgataatataacagtgaggagcattgtaggaagatatttggaacacagcagaatatattatttttataataatggaaaagaagacacatatatatcaagtgctgactggatgtataggaatttagacaaaagagttgaaactatgacagtaatagaagataatcttataaaaaaggaacttaaagaaatgcttgaattatatataaaagataatgttaaaagtaggatattgctagaagatggttcttatacaaaaattaaaagtgaaggtaaaattgttaatgcacagaaggatatgatagagatttgtaaaaagtttaattagaaaagttagataaatatgttatatgttgagcagaagtgatgtaagcaaataaaattcgatagaatttaataattaggattcttgaaaatggaaattagcttaagtagtgttaaatagagataaaaaaggctaaagtgttaatagctataatcgataattaattataagaatataattgagacataaatattaaattacattaaatattctaggagatgagcaaaatgaagaataacaaattaagaattttatctttagccttattagcattcctagctcaaggatcttgtacttatgcagcaagttcggataagagcgattatactaaagatgaattaaacaatttaactccaggatgggatgcaaaagacatagacaaaagtaactataaagttgattcctataaaaactcattttcaagtacgcagaccccagatgcaaaggataaggatactagtgatacaacaagtaaagatgatacttcaagtacaacaactgccgtagacacaagtgtaggaaatgctatcgtaagcagttcaccgagcacaggaaacagaggagatttttggggaaagacttcagatggaaaatggatattgattgaacaaggtgttccagtaagtggttggaaaatggtaagaggacaatggtattacatggattctaatggagtaatgcagactggatggataaacgatggaaacaactggtattatttaaattcagatggatctatggcatataatacgtatgtaggcggttattatcttgattggaacggtgttatgcaatagtatattaaaaaataaattgttataagtaatttctaggcaaaacttatgtttggtttaatcaatcgagctgtgagttttgtcttttttattttgaatagaaaagagttgaatcttaatatttaacaagtagggtataataatttatcttaaatggaaaaatgaaagatgataaaattattatttataaaatgataaaagataatgacatttaaaattttaaacataataaatatagttaagtgcaagagtacagtcgttaataacgaatttactcttgcaatcaagaagttagtttttcattttaccaaaataataaatatatatacttgacataaagttaactctaaggtgtaaaatttataggaaaggttcatattcatggatttattaccttatattcttatattatgatatgaaaaaataatatagattgaggtatgagaaacaaaattcatggattactatttttaataattgtaacttaaattatatattataaggagagagcgtttatggaaaattttaattattcaatacctactaaagtttattttggaaaagggcaaatcaaaaatcttgctgccataattaaagaatctggtaataaaatacttatagcatatggcggaggaagtattaagaaaattgggttatacgatgaaatgattaaaatattaaatgataattcaatatcatatgttgaattgtcaggaatagaaccaaatccaagaattgaaacagtaagaaaaggaattaaaatttgtaaggaaaataatgttgaagtagttcttgctgtaggaggcggaagtacaatagattgtgcgaaagttattgcggcaggagtaaaatacgaaggagatccatgggatttagtaactagtccacaaaaaattaatgaagtattgcctatagtaacaatattaacactatcagcgactggttctgagatggatccacatgctgtgatttctgatatgacaactaatcaaaaattgggtacaggtcatgaaaatatgaaaccaaaagcttcaattttagatcctgaatatacttattcagttcctaaaaatcaaactgcagctggaactgctgatattatgagtcatatatttgaaacttattttaatcatacaaagggtgtggatatccaagatagtacagccgaaggattacttagagcttgcataaaatatggtaagattgcaatagagaatccaaaggattacgatgcaagagcaaatttaatgtgggcttcaagctgggctattaatggcttgatttcatatggaacaaattcaccttgggtggtacatccaatggagcatgaattgagtgctttttatgatataacacatggggttggattggctatattaacacctcattggatgaaatattctttagacgatactactgtttttaagtttgctcaatatggaataaatgtttggggaatagataaaaacttagataagtttgaaatagcaaataaagcaatagaaaagacatctgaattctttaaggaattgggtataccaagtactttaagggaagttggcattgaagaagataagttagaattaatggcaaaaaaggctatgaatccatattttaagtatgcttttaagccattagatgaaaatgatatattaaagatttttaaagcagcactttagcaaataccatagtgtacgcttatgcaagaaaagtttaaatatattagagtaatagcgtaaaaattttatgaaaattatatactaaaatattaacggcagtatacttactgccgttaatactatataaatttagagggagataatgtttatgaaattatttagtaaaggtgataaagtaggaattgttgcttgttcaaatggcttagataaaagtaatatattaaagatgaacgagctaggagaagcattgaaagaattaggacttatacctgtatttagtgataatttatataaaaattattctgtatttaatgggagtaataaagaaaaagctgaaatattaatgaatttttttatagataatgatattaaggggatttttgatgtatccggtggagacttagctaatggcatattggatcatttgaattttgaaacgataagaaataatatgaaaccatttttggggtatagtgatttgtctgtagttattaatgctatatattctcaaacaaatatgaagacttatttatatcaaataaggaatttaattggtgatagaagagaagttcaagtggaagaatttaaaaatacatttatggataatggaagtaaacttttaacatttaattatgaatgggtgcaaggatgtgctatggaaggaattgtggtaggaggaaatcttcgatgtttattaaaactggcaggtacaaaatatatgccggattttaaagataaaattattttcttagaaagtttaggtggtgacgttccaaagatgttcacgtatttgacacaatataaacaactgggagtatttgaacaagttaaaggaataattcttggtgaattcagtgaaatggaaagagaaaaacacgttccaaacatttcggaaattactaaagagatagtagaaaattctaatattccaattataaaaactagtgaaattggtcatagcaaaagttcaaaatgcatgataattggagggaaaataaaactatagtttatatgaaaaaccatgtgcgagtagaagtgattcttttatatacatggtttttacattattttatggaatttatatgaattttaacctataattatatagtacataatgaaaatattataatgggaggggaaaatgttaaaaaactttaggacattatctataacaatagttatgttattaataaattctattgcttttacaggatgtaaaattgatacaagagataattatggtctggataaggacaatcctgttgcagtggaagtatggcattattataatggaatacaaaaaatacagtttgataaaattgtagaggaatttaataaaagcgtaggtaaagacaaaggaataattgttgaggcatttaatcaaggaagcgtaagtgaaattacggataaggttattgatatcacaaagaaaaaagttggagcagaaaaaatgccagatgcttttatggcatatccagatacagcttatgagatagagaagttaggacttttatcagactttggcaaatatatgtcagagaatgaaataaataaatatatagacagttacataaatgaaggaaaattggatactgaagataagctaactatatttccattagctaaatctacagaaattttaatagtaaacaaaacagattgggaaacgttttccgaagaaacaaatgcagatataagtgagtttaatacttgggaagggatcgcaaatttagctaaaaaatactatgattggactgatagaaaaacagaagctaaagatgacgggaaaacttttttcggaagagatgctatggcaaattacattataattggaagtcaagaattgggtgaggagatattcaaggttactaatggcaagctagaggttaatattaatgaaaaggttatgaggaagctatgggataatttttatgtgccatatataaatggatattacggagcatatggcagatttcgttctgatgatgcaaaggtaggaaatataatcgcattagtaggatctacgtctggagcagggtattttccagattcagttataacaaatgatgatcaaaactataaaattgaatcgatgattttaccgcttcctaagtttaaagattcaaaagttgcgtatatgccacagcaaggtgcaggtatggtcatgattaaatctgactctagacatgaatatgcagttacagaatttttgaagtggtttacagattctgatagaaatgctaagttttcaatagcagctggatatttacctgttaagaaagaagcaaatcatagtgaatttattgaggggaaaattaataataacgatgttttggatgtccccaaaaagtcacaagaagctgttttagaagctatagatcaggaaagaacatacaagttttatgcaagtaaagcttttaatggcgcagatgaagcaagagatattttagaaaaatctatgctggaaaaagcaaaaatagatagagaaaaagttaaatctttgttgaaaaaaggaatttctagagaagaagctataaagagttttaacacagatgataattttaataattggcttgaagatttaagaaaaagcattaatgcagttacttaatttgatttgtaattcataaaattacaaaggttcaaagttactgcgagcggggtgaaataatgttcttaataaaaaataagaactctataattagaaagttacttattccaatggtaattgttgtattagcacaagtagtgctttttgtaagtgtggttttattgagtggaattgttgggattcttaaaaataattcatttaatttgttaaaccagaaaattcaatcaagaggtagttacattcaaaatgagatgattcaacattggagtaatgttagtgaatctgaaagcttgattaatgccaatattttgcacaagcttcatagtaaggggattacggtaaaggatttggacagcaacacacaattcactaaagagttattggaagatgtttcaagtaatttgatatttatgctcagaaagaattatgtaactggagcatttttaatacttgataataattctgaagaaaaagtaggattatattttagagatttagatcctaattcaaatccaagtgataaatcagatttattgatggaaagaggtcctgcttccattgcacaaaatttggggattcctttagatacatggtggaataacaggtttatatttaatcagaataagaattcatctccagaagaatttttttcaaagcctatcaacgcagctgtagataataaaggattatcttataaggatttaggatattggagtaaaccattttcattaagtgataaagatatacaaattgttacttattcagttccgttgttagatgaaaatggcaaaccatacggagttcttggaattgctatttcattaaattatttaaattcattactttcatatgatgaaatagactctaatgggagaggtgtttatctagtaggcgttgacgataacaagaatatgaactttgaaaagattacaacaacaggaccattagcaggaaaaatacttggagaagaaaaaaatattcagtttaataaaaaagaaatatatgattcaatatatgagataaaagaaccagattcaaaaaatatagcttatgcatcaacaaaatatattaatttatataatacaaatacaccatttgaaaaagatacttgggcaattattggaataatagaaaaggataatcttctatattattcagagagatttgaaaggcttctatcggtatcattaattatttcgactctggggggaataatagtaattgttattgtaggtgaaatggttacgaagccaataagaaatttagctcaggatgttagagaaagtaatcctagtaaaccaatagaacttgggaaaataagtatctcagaaatcgatgagttgtcatcagcaataatgacgttaagttctaacgtggcagactctgcttcgaaaatgtctcaaattataaaattattcaatatgcccataggcgcttttgaatataaaataggacatgaagtagtgctatgtacagacacattttttgatgtaataggaattgaaaaatcaaagcgatttgattcatacgtagataaaagatattttagtaaaattataaagaagataacagaggagaaagaaagttttcaagaagaaacttataggattaaaggagcgaataaagaaactaagtggattaagttaaaaattttagaggaagagtctagaactctaggagtagtaagtgatattacacaagaaattttagaaaagcaaaaaatagagtatgaaagagattatgatatacttactaatatgttaaatagaagagcatttcataatacagtaaaagaaatattagaaagcgaggatcttaaagtaggagcatttataatgtgggatttagataacttgaaatatgtaaatgatacttatggacatgattatggcgatgaatacataagaaaagcatccgaaatattaaaggaatttgagaaatatggaggagttgttggaagaagatcaggggatgaattctatacatttttatacggatatgaagataagtacgaaattagaaaaattgtaaaaagtattcattctggtatcgagaattcagtacttaagttacctaataatagagaattgaaagttagaatatcaacagggatagcatggtatccacatgatgctataacttttaaggatttagctaaatattcagatttcgcaatgtataaaattaagaaaacagtaaaaggaaatataagtgagtttaacaaagaagaatatactgaggattctttcttgttcagcagtcaagaagatttaaataaattacttgatgaaaaacttattaagtatgcatttcagccaataatagatgcaagaacaggaaaaatatttgcgtatgaagctcttatgcgttcacagttagagtcccttaaaaatccgcttcatataataaagcttgcaactgctgattcacgattatatgaaatagagaaaattacattttttaaagctcttgagagctttgtaaggaataaagaggaattcaaggatgctaaactttttataaattctttgccaaactatgtcttatcatatgaggataggaagaggtttgaagaattgtatggagaacatcttgatagattagtaatagaactacttgaaaatgaacgctctaatggagataacatttctataaaaagaaaagtaattgaaaagtggaatgccaaacttgctattgatgattttggctcaggatataataatgaagcagtattgttagcaattacaccagattatgttaaaatagatatggaaattgtaagaggaattgataaagatttaaataggcagcagatttcaaaaaacctcatatcttatgctaaacaaagaaaaattaaagttgtagctgaaggggttgaaacaagagaagaattaacgaaacttatagaatttggagttgactatctccaaggatattattttagcaaaccagaatttactccacctgagataagtaaagacttagttatggatattctggaaatcaataaagaatttaacacaaaataaaaccaagtcatattttgggggatagatactaatggaaaaagaagtaggcgctaaagttgttaatgggaaaataataatagctgatgggataaatggggaaattataactataaaagctaaagaaaatgtaaatctatttattaatgatgtagaatgtgaaaagtttaaaccatatgaagtaagttcaaaagataagattacttataattgcgagacaactcctgcaaagagagaagtaaatataactatatctgaagataaaatgaaagcttatatgacagtggagtatatacctaagactgaatacaaaataaaggacagggaattttacataaatttagctgtatctactgaagttctgttgaaagaagaacctgaatactttactgttcaagagttatataaaaaactaaaagaaaaaggaatagtttttggaataaaggaagaatctttagaattgatcttaaaagggtgctcgagtgaagttttggtcgcagaaggattggagccagttaaggatacaccgagtgaggtaaagttgttttttacaccaactcaaatggtttttccagaaccagattctaatgagaaagtagactttaaaaatttatttagaatttccaatgttaatgctggagataaaatcgcagaaataatccctgagattccaggaaagaatggaatgaatatttttggtaaagttatagagcgcgaatatattagaagcttaccaattgatgcatcaaaaggatgtaagattgaaaataatcatattatatctcttattgatggaaaagcacatattgctaatagaagtgtaagcgtaaatcctatttacaccgtggaatcagtaaatatggaaacttgcaacattaaattttatggagatgtagaagtttatgatagcgtacaggataatatgtttgttagcgctggaggttcattagatgtaagtcaaaatgttaatatggctaatgttgttacaggtggagaaataacaatcttaggaaacacaattaattcaaagatattatcaggacaagtagatataagaaaaaaagaatattcagatgtacttactgaatttaaaaatattttagttagtatgatagagtatattaacggattgaatctacaaaattttgaaagaaaagattttgtaaagacactgactgagaagaattttgggaattttcaaaaagtagcattaaatataatttctttaaatataaaaaataaaacaaaacgcagcaaacttgtagattttataaaaggaaagatattaggacttaatatcttggaaataaagtcaatttatgatctaaaaactttacttaacatattggataatgaaatagattattatgataagaatataatagtccccctagatattcggattggttattgtcaagaatgcgagataaaatctacaggaaatattatcataggtggtaaaggtgaatatacttcaaagttaactgcaatgaaggatataatttttacaagatctgattcggtggccagaggaggagttttatctgccggtcaaaatataagtttaggagtagtagggagcagagcatatatacctacaacgttaatggtaccacagtatgggagaataactgctgctaaagcatatgcaaacacagtattttgctttggtaggacaaaggttacattggatgaagatctgaaaaatattaatgtgtattttaatagtgagaaaagggcaattgaatttggtaaaacggcactgtaaaactacctactctaaaaatataaaaaatatagggtatgatggttcgagaaaatatgtttgttttaaaagagtttttggagaaaattaaagaattataaaaataataagtaagtatttgtctaaaaaatatatatgtgatataataaggcaacagttcatacaaaagactcgtatatttccgatattatggttggaaagtctctacctgctatccgtaaattagcagactacgaggtagtgttttagtgctaagtattattatattcgcatataaatacaacacctcaactttaagatggggtgttgtatttttttgaaaacttttctgaatatatgtataaagaatttgcgtgtctatgtatgattaaattttacatagggagattgaaagaaaatggaattaagtaacaaagagattttaatcgaagatttggactgtaaaaatgaagaaattagtgaacttctttatggagttgaggacaagcctaatttatctacacaaattttgctaggatttcagcatatatttgctgcgtttggtggaattatagtagttccattagttatttcgagtgcattaggatttgatatagttacatcaacagcacttatgagtgcaactatattatcggctggaatagcgacttttattcaatctagaggtattggtcctgttggtgcaagagttgcatgtataatgggaacggattttacatttgtagcaccatcaattgcaattggtagtatttacggacttccaggcatattaggtggaacaatacttggatcattagttggtataggtttaagttttataataagacctatgatgaaattatttccaccactcgttactggaacagtaataacattaataggattaactttattgcctgtgtctatggattgggcggctggcggaagtggttcgcctaattatgggaacttaatcaatatctcaattgcaatgcttgtaatgattataacattattgttaaacagatatggaaagggcttaataagtagtgcatcaatattaattggaatggcaattggatatattatttgtattcctcttggaatggtggatttttcatcggtaagctcagcaagttttgtgtcatttccaaagatatttgagcatggagttaactttgatcctaaattagtgcttccgttcattcctgcttattttgttacaacaattggaactgtaggatgtttaaaagctattggagaagtttcaaaggttgaaatgggagataagaggattggagcaggagtattatctgatgggcttggaagcatgcttgcaggtattcttggaactttccctaatacatgttttagccaaaatgtgggtttaattccattaacaaaagtagcaagcaaatatgttgctatgatggcagggataatattagtaatactaggctttttaccaaagtttgcagcactaataaatataatgcctcaaccagttttgggtggagtaggtattgtaatgtttggtacagttgcggcatcgggtattaagactttaagcagagtagaattaaataaccgtaatttattaataatagcaacagcaattggacttggtgttggaattacattccgtcctgattttataagtcaattaccagaaggtcttaaaatgattttctcatcaggtatttcgactggaactattgcagcgctaatattaaatttattattaaaacaagaaaagagtggagtagaatagaatggaaagcttacataaaagaattttagaagaaggacaagcattgtcagaaaatgtactgaaagttgattcatttttaaatcatcaagtggatccggaattaatgtacgaaatgggtacatactttaaaaattactttgagaatcataaaataacaaaggtgtttacaattgaaagttctggtatagcacctgctgtgatgactgcaatgcaaatgaatttgcctatggttactctaaaaaagcaaaactcaaaaatactgaatggtgatgtttaccaaacaactgtacattcatttactaaaagtttagattatgagttgacattatctaaaaaatatataaatgatgaagataatatattagttatagatgattttttagcaaatggcgaagcggcacttggggctgcacgtttgatagaagaagctggagcaaaagttgcaggaataggaatagtaatagaaaagtcattccaaaaaggagctcaaatgcttaaggacaaaggatatgatgtatactctttggcaagaatagcgaaactatcaaaaggtataatagaatttgttaaataaagtatagtttatgattgtgatatctatatttttattacaaagtaaaaattaaattatatttattagcattttaaagagtgtctaataaagatcttataaattagagttgttcaattttgcataatacaagcaaagttgaacaacttttaatattttacagagcatttaaattatctaatagtcattaaaaagttatataaaaattattttttatataactttttttcaatggaattcatttttttgtgtttaatatacacaaaatataaaataaaatactttatcagtataaagggagtataatactttcttaaatcaattattgatttatgtcattctaaaaagtaaaatagatatataattaatttccaatatatgaaattctttattggaaagctatataaaataaaaaggagacaaagatatgaaagcttatgaacgtttattaaaatacgttaaggtatatactacctcagatgaatcttcagaaacacatccaacaactaaaagacaatttgatttagctaatatattagttgaagaaatgaaggaaattggacttcaagattgtaaagttgatgaacattgttatgtatatggagttattcctgcaacaaaaggatatgaaaataaagcaagtataggacttatagctcatatggatacagcaccagcggctaatggaaaaaatgtaaaaccacaaatcatagaaaattatgatggcggcgatattattttaaaaggaaataatagcattttgtcacctaaaaagtttccacatttaaaaaacttaaaaggtaagactataattactacagatggaacatcattgcttggagctgatgataaagcaggtattgcagaaatacttactgcatgtgaaactataataaatgaaaatattcctcatgggaaaatatgtgtcggatttactccagatgaagaagttggacttggagcgcatttatttgatgtaaaaaatttcggggcagattttgcatacacaattgatggaggcgaggaaggtgaaatttcatatgagaatttcaatgctgcagcagcagaagtgaatattcatggggtatcagttcatccagggtctgcaaagaatacaatgattaatgcaacaaatgtagctattgaatttaattctatgctgccatcatgtgaaagacctgagcatacagaaggatatgaaggtttttattatttagatagttttaatggaaatactgaacatgcatcactaaagtatattttgagagatcataataaggaaaagtttgaaaatagaaaatcaacaatgcaattaatagaaaaattattgaatgaaaaatatggtgaaggaacagttagggttacattaaaagatcaatataaaaatatggttgaacttataaaaccttgtatgcatttaatagataacgctacagatgctatgaaagatttaggtgttgctccaataatagaacctattagaggaggtactgatggtgctactttaagttatatgggacttccatgtcctaaccttggaacaggaggccatgctttccacggtgaatttgaacatattgcagttgagagtatggacatttgcactgaaattataatagaaattctaaagagatatgcaaatcaataaatgagaatatttaatttgaaataaattttttggattaaattacaagtgaaaatatgagattataaaaaatgaattattaaattaaatattatacctcaggtttttaattacattaagagcctgaggtattattatattatttcataaaatgtaaaaaatatataagttcttacaaataaatactttttttattctttaggaaattataatgcaattaaatctgtaaataactttatagtagcatattttactagggttaattactataaaagaataaaaaaataaatcatattcgcctgccaaatttttctcacatgcgttcgcaaaggcagatgcgtgaaaaaaatcttcagctccacagtcgcctgcgatttttttatggaagatgtatttaaatgaaactttttaaaaaattaaagaatttaagaacttaagaatttaagaataaaggaatataagaatttaaatttttaacaataaaaaaaacttagaaagttaataatttatagggaacataagggtttgtagagtatatagaaattaccataaataatagatttaagttattatgcttagaatagtataaaaattactaatatagcttgttcgagctattctatttatttctattagataggtagttcttgtgaatagcattaaagaaaaagtcagtaatttcttcattaattttatcattagaattattatggacttgattatttttcttttttaaacaaggagtatgttcattagatttttgctttttagctgaatcgaattttattatttttgaattgctcattataatatcatctccgttttttattatagaatgtctttcgccatttatatattttacatacattaattccatgaacgcaccgccttatacttattaattaaaataaaagtattaaataaatttactgataactaagtatatgagtctagcttatgaaatattacataataatattaaagtaatttttatcaccgatatgagttatggtataattttcatgtaatcttataaaggaataaatatatttaatcatagttatattattaataagaaatatttttgcagttaaatattatattagtatatggagtgggataaatgaaaaataatgcagcacaaagagaatttaaaaagtataagggtcagataaatcaaatagaagaaatagttgagcattcaaagccaggagcattattagagcatgagagttcaataagaaagaaacttagacatcttaaggaattagaaaatcagagtttaagagattttaatgaggtttatgagagatatgaagagctattagaaactgtttcaaagaaaatgcttgattactataataaaaataataatacaagttttgatttttatgaagtagtgcgtggaaattataatagttttttaaatcaaggactaatgacaatattaactaaacaacatattcccaaattagttgcaaaagaatttgaagaaaatttcccaagtaatcctaaagatgagtatcgtcaagcaagaagcatgaaaagaaagttctacatacatttaggcgatacaaatacaggtaaaacttataatgctttagaacgtcttaaaagtgcaaaaaaaggtgtttatttatcaccacttagaattctagctttagaaaattttgaaaagttaaatagagaaggagtaatttgtgatcttttaactggtgaagaggaaataataaatgtaggatctactcacacatcatgtacaatagagaaagttaatttaaaagaacattatgatatagctgtaattgatgagattcagatgataagtgatccttttcgtggaatggcatggagtaaagctctactagggcttcaatgtgatgaaatacatatatgtggagctgctaatgctaaatatatattagaaacaattataagtgattgtaaagatgaatatgaaataagagaatatacaagagctataccattagaagttgaatataagaattttagttataatgatgttcaggaaggtgatgctgttgtagtcttttctaaaaaaagagtattagaaatagcagaggaatattcaagtagaaacatcaaggcaagtataatttatggtgatttaccacctgaagttaggaaaatgcaatacgaacagttcattaataaagaaacaaagattcttgtgactactgacgcaataggaatgggagtcaatcttcctattcgaagaattatatttatgagtataaggaaatttgatggagaagaagtaagagagttaacttcgcaggaaataaagcaagtaggagggcgtgctggtaggcttggtatttatgacgttgggtatattgccagtgttggcggcaatgcagatataattaaatctaaattagaaacagaagacgaggttataaaacaagctgttatagggccatcagaagcaatacttaagattagaagtctgcctttaaatgaaaaattagccctttggagtacaagaacagaaaaattagattattatactaagatggatgtaagtgaatatattttgatcttggataggctaaggaaatacaagcttaatgaagaaattcaatgggatttactgaaagttccatttgatgtgtctagagatgaacttatgaatgcatttttaaattatgtagatgaactatttgtgaataaacagaaagaattatttaaaccccaaaactttaatggtggtttggatgatttagaaatttattatcagaagataaacatgtattactcattttctaaaatatttaatttaaaactagacgttcaatgggtttatgatgagagattaaaagtaagtgaagaaataaatgatatattattaagactttaataatatcaataattaatgatgtaataggtaataataaattgagtattaagcttacttaaatttgttattacctattatttcgtaaaaacacatttcaaaataaacattataaaattagcaatctaagaaagatttaaaattagtaacaaaatatgataagggacaataatatgagattgaaaacatagagtaataatgttaatagataaatttgtcctatttcaatttttcatgaaatattggaggtagctgattgagtaataatattatcgaaatgaataaaattactaaaagtttttttatagggaaagaaaatcaattagatatacttaaggatattgatattaatgtacaaaaaggtgaatttatagccattgttggcgcatctggatctggaaagagtacattaatgaatattataggagtacttgatagacaaacatcaggtcagtatgttcttgatgaaatagatgttagtaaagtaagcgataataaattagcagagattaggaataagaaaattggatttgtatttcagacttctaatttaatagctagaacaaattctatccaaaatgtagagctgccaatgctatattatggaatggatagaagaacaagaattaatagagcaaaagaactattggagttagttggaatggaagataggttaactcacctgcctagtgagctgtcaggagggcagaagcaaagagttgctattgctcgtgcattagcaaatgatccagatattatacttgctgatgaaccaacaggagcgcttgattcagaaacaggaagaatagtcatgaatttatttcataaaatacatgaaaagcaaggaaagactatagtgctaattacgcatgataataatttagcaagtgaaacccaaaggatattaactataaaagacggaaaaattattggggaaaagcatctttgttaaaaaatataaactcaaattatttattgatattccatattaaataattccgtattattgtaatagtatagcacatttatgaaatgttgtttacaaataccaataacatcgctaaagtaatatacgaatttgaaaatttatctcaatgattatattaaaatggaattttataaggaattgaaaaggttaactttaaaattatcataaaattttcttgaaaattgtaataatatatttatatatatccaattttgaggtatactttaattgtttgagtttttttataataataagccgatttacaaaataatttaaaaaggggaacgcaaatgagtgaattaaatcatgaacttggaattatagcattagaaagttgttcagaattaggaaatgctatagacaagtatatccaaaaaaacagaaattgtactgagtcattcttagtgccacttgatgaaatacgattttctaatggagaaggaaaagtaaaaatttctgaatctatcagaggaaaggatatttatattttatgtgatgttggaaactatagctgtacatataagatgtttgggattgaaaatcacaagggtcctgatgaacattttcaagatataaagagaactgttgcagcaattagaggtaaggcagcaagaataactgtaattatgcctcttttatacgaatcaagacaacatagacgtaaaggtagagaatctttggattgtgcgttagcacttcaagaacttgaaagattaggtgttgatgaaattatcacttttgatgtacatgaccctaatattcaaaatgctattcctttactatcttttgaaaatgtatatccaacatatgatattgtaaagggaatcttatcaaatgagaaatcattagaattagataaagaaaagctacttgtaataagtcctgataccggagcgatggatagggctatatattactcaagtgctttaggagtagatgttggcttattctacaagagaagagatcattctacaattgttaatggaaaaaatcctattgttcaacatgaatatatgggaagagctgttgaagacaaagatgtattaatagttgatgatatgatagcatcaggagagtctgttcttgatatagctaaggaattaaagaaaagaaatgttaagaatatatatgttgcagcaacttttgctttctttacagaaggcgttgaaaagtttaataaggctcatgaggaaggtttattagcaagaatatattctactaatttaacatatataccagaagagttaaaagactcagcttggtttaagagcgttgatatgtcagagctttgtgctagaattatcaatagattaaattatggaagatcaattgctaaatacatggatgcgacaagaataatacatagcttattaaataagtaattactttatatctatatttataagaaaagagctacttaggtttttaaatgaaataacaatttcatttaagtaattaagtagctctttttaatagttatagtagtgaaagtaaatttatataataaagcagtgtacatactacaataatgttaattataaaaatgttcttcttgatgctattaatctaagctcagtagcatctgttatatcataattatattcactacctttagaatgtgctgaatttttattgtaaatatattctgaattactgaaaagtgaatttaaaacagacttacatagtttaaatgcataatttagaattttagatataccttttgaaaccttattaagggaaatatttttgttagttgtataggttaccaatttaaaattagatttattaatagctttaccgttcataataatccctccagtttaaaaaataatttgtattttttaatgatatttaattttttattacttctatactaataatataaatcatttatataaaaactgcatcctcatataaattcccatttggtaaaattgtaggcaattttctgaagatatttatgaaaataaatttaatattatctttatagtaataaaggtttggtaaatgttaataattaataaatttaatacaaatttcttctgaaatggattaaaaatttaatatattttagtaacaatacagtaataaaagttatgattagttaatatatataatgtgaaagagaattaagtaaaataactttttataaaactatataatatcaagtgaaacttgattcaggtggggaatacccggctaaatcgtagtttaacttatctaggtctacccacagtttccacccgcttaaaaagtgagtgacaaatgtgactagacatcagataaattatgttgttattgttagttaagaatattcatatattaagattttgtttttagaatgtcgagattcatatttagtagatgccaggggaggataagatgaaaattaggtgtaaatttgcgttaatagtagctttactattttttatgacaatgatgagtaatgaattgccagcttttgcagaacctgaactatcactcgaacaagctatacaaaacattcaagaatgtgatagcaaaattgataataatatagacaagctaaataagattaaagaagaagtttctcaaaaggaaaagcaaataaaggataatgaagaacaattaaagatagctaaggaagatgtagaagagaaagataagaaattagccgatagattaaaaggtatacagttaaatggaggtgttgaatcaacaacgcttcaatacttagatgctttaatttcttcgggaaatgttttagaagcaatgaataaggcatcattaatatataaaatatgtgaaaatgataaaaatatgattttacaagcaaaagagtccgaaaaaaggatcatagaagtaaatgaagagatagaaaaaggaaaagctgatttgcaaaaaaatgaaaacgatattagaaatcaagttgtagaattagaggatcaaaaagataaactattaaaatatattaaagataataatatattattgagcaggaatacaggcataactgttccggttacattatcatctgatattactggtcagaaaaggtctctaatagaagaagctgaaaaatatttgaaagttccttatttatggggaggagagtcaccatcaggttttgattgctcgggtttgattcaatatgtatttaagtcgcaagggatatatatacctagaatatcacaggaccagcagcgttttgcgaaaacaattagcatatctgaaattaaaccaggagatttggtatttaataaaccatcagaatctacacacgtagggatgtatataggggatgatatgtatattcaagcgcctcgaactggagatgttgttaaaataagcagattaagtaggtccaatatgaaatatgttggaagagtattagattagagtcatattaaaaattacagcacataaggtacttaaaatattaatagcggccttatgtactgatattaaaaatatttaatcatatatatcagaaaactctatttttattctttgaatattactttcttttgctaaatcctcatctgaagtaacattttcgctttctggcaaaactttaacgggaagctctattataaactcactgcctttgccatattcactattgattttaattgtaccattgtgaagttcaacaagagattttacgagagaaagtcctatgccacttccttctctttttcgcgaaagtgatttatctacttgaacaaatctcttgaaaatggataattgtttatctttagggattccaacaccagtatctcttacagagactataatgcttgaatctttatctagtatatttacaaatatgcttcctccagaagaagtgaattttatggcatttgaaagaagattaagcattattctttcgattttatccgcatcgcaagccattagcttttcttcaacgtttgtatcaaaaataatgtctaaacctttgtttttagcataatcagttacagataaagttatatcttctatagtggatatgatattttcattttttaagctgagtttaaagtattcagcatcaattttagtaatatctattaaattatttactagccttaataacctatagcagttttgtttcataatattatagtatttgcttattttgtctttactatctgtattagttttgtttgctccaattaaatttagaagttgcagtgtgctaagcattacgtttagtggggttctaaattcatgagataaatttgcaaaaaattctgttttaagtttatcatattctgcagctttatctaataaccgactttgctcttgtatttttaatctaagattttcagattttttatgttccgaaatatctcggataacacttaatatacatgggttaccttcatattcaatagctccagagtatatatttactggaataatatttccatcgaattgaatcattttttcttcgattataggtaccgatatattatgcttaagcactttttcaaatctattaagtataatatcgcgataatccttatgaacaatgccaatttcaaataagtctctacctagaatacttttaaaattgttaatgtttagtagtttttccacgcctttattcacaaaaagtattttataatttgtgtctaaaataaaaactccctcataaatactgtctaatatgtataagagttgcccctttttcttttcgattaacttataagtgtcttttagttttttatatttctcttctctgagaatttttatattactaatttttttcttattttttaattcgagtttccaatcaagcataatcttttcaataaacatatgaaaaaaatctaaaccgacgaaaaaagaatcgtaaggtaaatttaagttgttagctagtatttgaatttcttttgtgctgtcctcataaattcctgtatctaataggagaagcttattgggttttttatctaaaataaatgaggtattatctttatccatgtttttaagccagcctgatgttataacatatgaatttgtatctaaaagattattaactacatctttattaataaataagttaagacagtgttccattttatatagtgtgcatttttctttgttattaataaaatcttctaagttagagctgcaacaattattttcaataataacaaaaattttattacacattttttcacataaattaatagcctctattaaacagtgattttttttgttggttgcttttgaacatgtggatgtaaatggtataatcataacattttttatattataagtctttactgcaaattcaatctcttcaataaaattttcacaaattactatacccaaattagttttcatgttatcctcccattttagctaagagattaatttacctcatagctgatttttactaatagatcatatattattcaatagcgattttgtaagtaaaagtgactattccatatgtttaaataattagctatgtatataggcttggctaagtatatataaatttataatttatcagaaatttgttttaacataaaaagttgattaaacaaatgcattaatattataccccttttttttctaaaattctataaaattacccatttttacagtttatttgatattataaaatgtagatagtatcttgtattaagagcaaggtaaatttaaaatgaagagataaaacaatgaaagatgatacaaatataatttttaatattataaagttactgttttgcatatactatgtttaacttagaagcaatatataaaataagctgataaaattggaggaaacaatgaatacaaaagagaattttttaagcaatgtgaaaagcggtgaaagcgtaaaaatatcactaatggtcatgaaaatattatttagagatcctgcaaaaatagtttgcatattggctgataaaagtggagaaacgaaggcaaatttacccaacaagaaagatgatattacagatggaatagttttagaagttgagggaattaaagatggaattctagatgtgaaaaaatatgaaattattacaagctatagcatttcagattatcttccgacagtaaataggcctattgatgatattatgcaggaaatagagctttatacaagtaagtatattgtttcaaaagaggctaaagccttgaacgattatttctttaaagacgaagagtttctagacaaatttaaaagaggtataggcggagtatcgatgcatcataattacataggaggacttgcggaacatacattaaatgttatgcatttaactttaatgctttgcgaaagatatggttgcagaagaacagaaattgccatacttgctgcaaaactgcatgacatagggaagatttatgagttatcttatgatggaccgtttaaatatactcttagaggtgaaatggaagggcatatcgttattggtgttgaaatgatagataaggcaatcatgaaaaatccttcatattatagtgaagattttatcatgagaataaaaggctgtgtagttcaacatcatggaaaacttgaatatggttcacctagagaaatgagaatggaagaatcttttataataaattatgcagattcaatagatgcaacaatgaataaaatttctcaaataaaagatagaacagagccaggaaactggtcagaatatgacagaagaattgaaactaaattatatttatagtttaagaaaagggacgcgattattatatgaatattttatttatgaaagtcacattaagagcatcgtgggttcactcattaaaagagaaaagaatgattgtaaaaagcgtaacacaaaaattaaaaaataagtttaacatatctgtatctgaggcttatgaacaagatgttcataaaacaatagttataggtattgcaggaatatgttcgaattcagctcaatccgattctactatggagaacattataacctttatagaaaataatacagatgcagaaataatagatatacaaagagaagatattagagtgtaaagatagagacacataaatataagtgtttgagggatgtgtcatagagcaataattttagattctatatataaaattacaaatttaaatccgatactttttaataaattgtgtaattagttctaaagaataccaagtcagtatgataaaattttcatactgacttgattatttaattaatatattttattaaacttgttctgcaatatagtaaagcaattgctcagtagcagcccaacctaagcaaggatcagtaattgatttgccataaatgtgttcatcaattttttgacatccttcttctatgtaactttcgatcataacacctttaactaatttttttaaatcattgttatatcctctgctgtagagtatttctttaactatgcggggttgttcagcaaatttcttcatagagttagcatgatttgcatcgacaattactgctggatatggaaagttgcattctccatataattcagaaactctcatcaaatcttcgtagtgataattaggaatattattaccatgcttattaactgaaccacgcataattgcatgcgcataaggattaccagtagtatttacttcattgtgcctatataaaaaattatgttttgcatgagccgcttggattgagttaaacattactgataagtctccgcttgttggatttttcataccaacagggacatcaatcccactggccgtaagtctatgctgttgattttcaacacttcttgctccaatagccacgtaagtaagtaaatcatcgcagtacatataattcgaaggataaagcatttcatctgctggagttaacccagattcttctatagcacgaataaacatctttctgattgaaatcaatccttcaagaatattaggtgatttttcaggatctggttgatgaaacattcctttatatccttcaccagtagttctaggcttatttgtataaattctaggaacaataaaaagcttatctttaactttttcatttacttttgcaattctgttaacataatcgcaaacagaattttcatcatctgccgagcaaggtcctattataactacaaacttatcactattgcctgaaaatattttcttgatttcttcatctctttctgctttaatcctttttagattgtcagctagaggagtaatttcttttatttcctctggagatggtatttttcttacatttacaaaactcattgtaaagcccccttgtataaaattatatatatctaaaaatgaatgaaagaaatatgttgtatactataaatgatataatgttatattattttaaaagaagtatacatcatttgaaaaaaattcaaatttagtatatctatattactatataattgctgaaaaatctagtaacgtttagaatttatcaaaaatattttgaattttttataaatatgttaagaaaatttacgaaatagtaatcaaagtagattctgtctttgttcgatttacgaacagagacagaaaagataaatggaacatttttattatttacaatttaagtgctttttaggaatttatttcggggaaactgcatatattttataggtaaaaatatttgagaggtatttatgtctatttattttgatttaaaaactattaatgaacttacaggaagcaattcgtttaggcaacctaaagaacttacattagatgatttagcacaatatgatggaagagggggaaaacctgcgtatgtagctatagaaggtgtcgtttatgatgtaagcaatgaatcgaattggagcggagggacacaccatggtcttaatgcaggtaaagatttgacagaccaatttaattcttgtcatggaatgatgcaaattcttaataatgcacctaaagttggtatattagtagatgataataacatgagagatatgaattttgatatcaatgaaaatatgatgaggcaagttaaacaaaatacatcgaattttagaccagatgattggattagatatattgagccaatagtgagttattctttgaatgatactaatcagggaactggattacaaggtgctggcgcacgacgctcatatcaaaaagctattttactaggagtgcttgttggcttaggtaaaactcctcaggaagcaattacccaagttcaacagtggcagaatacaggagcaaccactttattaggaggaccaagtaccggaggaacaacaggcggtggcatgggaaccggaggaacaacaggcggtggcatgggaaccggaggaacaacaagcggtggcatgggaaccggaggaacaacaggcggcggcatgggaaccggaggaacaacaggcggcggcatgggaaccggaggaacaacaggcggcggcatgggaaccggaggaacaacaggcggcggcatgggaaccggaggaacaacaagcggcggcatgggaactggaggaacaacaagcggtggcatgggaactggaggaacaacaggcggtggcacaggaactggagggacaacaggcggtggcatgggaaccggaggcaccactagaggcgaatcaatagtaagaaatagacttttttttgattagattagatattaaaagcataaaggatgtgatattattcatatcctttttgagcataaaggtaagttttcctaatatattaatttacaatatagattttatttatcaataagattatttattgaatacaaaataaaaagaaacattgattgaatattaatagtttggaattaaattacattatattaagatataaaataggaatatgttaaacttataataatgttccaagttatagaaaattagaaatgaaagttatcataaaggttatcatgcatggaatgtcaagattagaggtctgaatcatactaacattctttcgattttgtttattaattctataggtaaatcacctcttaaagatctttctagtaaattaggattttttatgtcatttgttaatagaaatttttctattagcgctgctttttcttttgtgttaggatttaattgataaagtacataccaatcttccaatgacattaagggtatatcaatcttattaatttccgttaattctgagattgaatcagaatgaaaaatatatttgaatgtaccattgctgtgattaatctttaatccggctataatattaacctcagagccttctataatagatttatgaaaatattttggtgaatataatttactttcattgtttgctatttcattactcatatctttaaacatttcatcaatttttataatatcgtttacatcaacaaaaatagatatatcatttagggtatttaaaagaccaaagtgacttagtaagactgatcccccagcaccccaaacgatatttaaatcattaaacttatttcctatataactcaaagctttaagcatttttttcacctcttgaatttatattaatatagattattgatgttaataatattattaatatttaaaaaaattttattcattagagcgcaaaatataaataatgacctatttaggggaataagtcattatttacacctttgttagcatttatataattattaattatggggagaaataataataattaaattactatctcaaatataatatatatcattattgtgtcaatagtatgtcaaatatgaaataatgtccaatttagaggcgtgctaagtgttaacttgaaagacttcaaatatatggtatagtagtttatagaatatataaaattagtgagagtgagataaattatggagtggattgatgcagtaaaggaatacaatccctgtaatgagcaggaaatgaaggataaggaaattatattaaagtattctaaaatatttgatgatattttaactagagataatgaaattatacatatgacaagttcagcatttgtgattaataaagctagaagcaaggctttaatggttcatcataatatatataattcatgggcatggactggtggccacgctgatggagaaaaagatttactttttgttgctattaaagaagcaggagaggagactggggtaaaaaaattaatgccagttagtaatgaaatagcttcaatagatattttacctgtttttggacatataaaaaaaggaaaatttgtttctccacatttacatgcttctctagcatatattattgaagctgatgaaactgaggaacttattgttaagccagatgaaaacagtgctgttaaatggatacctattgatgaaataaatatattttctaatgaactacacatgaagaaagtatatgataaaatagtttctaagataaagaatttatagttattgagatatgcatggaaataccttcagtacataaaattgatagggtaataatgctgataattatttacataatattttattgtaatgaaaaaatagaattatgaaggggaatctgattataaacttaattacagtaagtttgattatgtaaggagaaatagatatgagatatgtaatagtttctgtagtacacggtgaagcaggagattttaataataatttaagaaaagaactttttagaaattttaaagcaaaatcatctaaacttcacgcacattttacaattaaggcaccttttgaatatgatgatgggattacagatttaaataatgtcctcgatgaatttattaaagtggaaaaagcagagccatttacaattgatggatatgatcattttaatgatagggtaatttttatgaaggtaaatatgtctaaggaggcaaaagaagttcatgataggctaatcgataaaatgaatgagataccgtatgttaaatttgatagaaaagatggcaaaaataaaactttccatgtgaccttggcatcaaagaatttaaaatctatttatgataaagtttgggattacattcatcgatataattgtgagtttaagtgtagcttcgataatataactatttataaatgggaagaaggaacttggaaattatataaggaatttagattaagttaatttaactacaattgaaggatatagagataaaaaactattttgttgtttaactatttaaaaggatagatagacaacaaaatagttttttattttttaaaacaatttttatacggtcatatttttctttgagtgcatgtttaaaactaaaagccttgaagatattaatgcagtaataggaattataagaataatacctatgccacagcttaaaacttgaaatacttcagaacaaaaaactttttcatttataatagtagagatagggtaattgagttcattaaaatatattattaatgtcataaatccgcttatgtatgcaaagagaagagtattagtcatggttcctaagatatctttaccaatattcattccagatttaaataagctattcttacttgacataggatcattcttataaatttcattcattgatgatgatattgatatagatacatctataattgctcccaataatccaattagaatttcacatattacaatttttgaaaagttcaattgaacatatagagacaggaatgcaacagtttctgcctgctcattgctaaaaccttgtatttgagcattcatactcatattatatgttataaacataactaggaaaataactattataacagataataaagaagaaaatgtttttttattaaatccattaataaaaaataagctaaaaaaactaatgaaaattgcacaaataaaagtaactttaataagatcaatttttgcaccaattagaataagcataaagaaaaaagtaaagaaatttaagattaaagtaaaaaatgatttaattcctcttgtgcctccaacaattgtcataagaataaataaaataattaataatattagtattatattcatgatcttaagcttctccaatcttatgtttttttagaatagcaatagatgtaaaaattgttattggaatacttaaaactattccgatgcttccgataagtgctctcataaattctagagaaagatttatatttataatataagttataggtaacccgtttctaagcagaagtaatattattggcatactaccacttagataagcaaaaactaatgtatttgacattgttcccataatatcttgtccaatttcttgagcagatttaattatggacttactatcaatattaggatttttatcataaagctcatctatggcagaagatatagaaattgcaatatccattattccacctagtgtacctataataagttcaatgaaaaatatcttttctggaggatgagttagaaactccatttcttcaaagtgaattccactccaattatttaactttattacaataccagctattagtattgaggttaaagtacctgttaaagttccaattatagcggaagctgtttttttattttttcctgatactataaataaagaagcaattataaaaagtatacttcctattatagagagtatagctaagtcataacctttggaaaatagaccaattattgaaaatacaattaaaatattaacaacaacacttactaaggatttaaaaccttttattcctccaacgagtaatatgagagctataaaaatgtttatcatataaataacatatttgtccctctttagatccagaatttttgcagaagttatttcattattatcgtcactttgcagagatataaaaatttcatcatttacttttaaatctaagtcgttaacttgagaaaatgatgttgtattattaagttcaatggaatttcctttaaatgtaccattcataataatagcttcaattttttgatttttcataggttctatttttccagtagaattttcttctttggattcattttcggttattgatgttattttagctattggatttccatataaattttcattagtagaaataaaaaacaaactagctaaagatacaacaattaaaattaatataattaaaacagtctttttattaggttgtttacctatatttgcatctaatttaaataagtacttatttaataaattcttagtcatacacctgtagctcccttaaaatacataattataacaaattgtaaatttacattctaaaaaattatactcttataaagttgtgtaatcaatcatattatgatcaaaaaatataaagttactaattatttgattttacataataagataagtaattatggaatttttttattcttgtaacatctttgactaaattctgtgacaaaactgtaaaaattatcttatataatttaagaaaacataagttaatacaaaaataattggactatataataacatatttgaaaggatgtaatttaaatgaaaaataaaagtattaagagtaaagttatgacaggcgttattttagcgagtatggtgatatctgcaagtacaggagtatttgcggcagattcattaaatgtttcaaacaataagtcagcagttcaacatcaaggtagagagaatggtttccaaacaaaattagattctttaatagcagaaggatcgataacttcagatcaagaaactgctataaaagaagcattaatgccacaaggcggatttaaaaatggagaacataaggatttctttaaaaataaattatcagatttagtaacatctggaacaataacagcagatgaacagacagcaatagaaacagaatttaaagatgcaaaaggaaactttaaaacagttttagataatctagtaacaaatgggacattaacttcagacaaagagacagcaatagaaaatacattgaagtcagaagctaaaaatggaggacataaagatttctttaagactagattatcagatttggtaacatctggaacaataacagcagatgaacagacagcaatagaagcagcatttaaagatgcaaaagggaattttaaaacagttttagataatttggtaacagctggaacattgacctcagataaagaaacagcaatagaaaatacattgaagtcagaagctaaaaatggaggacataaagatttctttaagactagattatcagatttggtaacatctggaacaataacagcagatgaacagacagcaatagaagcagcatttaaagatgcaaaaggggattttaaaacagttttagataatttggtaacagctggaacattgacctcagataaagaaacagcaatagagaatgcgttaaaaccacaagaaaagcaattaggagaaaaagataaatctaaaggaattgaaaaatataaagagatgataaagactaaattagatggattagtaacagcaggaacagtaacaactgatcaagaaacaactataatagaggctcttacatcttctaaataaagttgaattaatattaatatgttataatatttaacagatatcgtatacggttataaaaaataataattaaagaagggagtatcgcaaaatggttatattttgatcatgaacgatgctccttttcgttcacgacttggcttgttggaattctaaatgaaaaagtattatttaaatattgaatataaataaatagtattaaaacattgaataataatgctatttattgtataattattcatataataaataatatatggattaaataaaaaattattatgtaaatctaagttatatattgtttatacataaataaacaatttaagaattagacttattagatgaacatatttacaaagttgctaaaactttaagctcatatcttcactagaaatcataaatatatttgtggagaaaacatttgaaaatgagctgttaaaggttcttagctgtaggttgttccattttagcttgtcaaactgaaagttggagcatgctaaagtggatacaacctgctgcttagaaccttcagagatattttcatagcttttcggaatcaaaatatttatgatttcggtaagttatcacacaagtctagttttaaagttggacatctatattatgtataaacttatttacagtatatatactaaataaaatagattttttatttataaaaatattataaatagaaggagaatgagcatggcagtaaatttaaggggaagaagttttttaaagttattagattttaaaccagaagagattagatatctgttagatttgtctaaggaattaaaagcattaaaaagaactggaattttacatgataagctgaaaggtaagaacatagtattattatttgaaaagacatctacaagaacaagatgttcatttgaagtggctggaagagatttgggaatgggggttacatacctagattcagcaggatctcaaatggggaaaaaagaaagtatagcagatacagcaagagttcttggtagaatgtatgacggaatagagtatagaggttttagtcaggaaatagttgaagaattggctaagtatgcaggagttccagtatggaatggattaactgatgaatttcatccaactcaaatgattgcagaccttctaacaatagaagagaaacttggaagactaaaaggtgttaattttgtctatatgggagatgcaagaaataatatgggaaactctctcatggtagcttgtgcaaagatgggcttaaatttcactgcttgtgcacctaaagaattatttccatcagaagagttagtggaaaaatgtaaggagatagctcaggaagctggaggtacgataactttaacagaagatgttaataaaggaactaaaaatgcagatgtgatctatactgatgtatgggtatcaatgggtgaaccagatgaagtttgggaaagtcgactaaaattgttgagcccatatcaagtaaacaaggatgttatgaataatgcaaatgaaaacgcaatatttatgcattgtttaccggcttaccatgatttaaaaactaaagtgggaaaagatgtaggagaaaaatttggcatgactgcattggaagttacggatgaagtattcgaaggaaaacaatctgtagtatttgacgaagcagaaaatagaatgcattctataaaagcgataatgttagcaacaattggtgcataaattatccagaattaatcttaattatacaaaaattattcactaaattagagagagttttctatagtaactctctctaattaattttgatctatttttaaataagcaaatatactcatgaaatggtaaaattttatttgaaccaaacatcttcatattctttatgtgaaacaaactcctcttctgcaaaccaacattgtggtattatctttttgttatgttgtctagcaaaatccacgacccttttaaccagttgctgaccgatattttttcctctaagttctggtgatacaaaagtatgatcaagtataatgttattttctccactatctatatatgttactacagcttttatattatcttcgtcatcaccgatataaaatttatgattaccttccttaatctcaaccaaaataattctcctttctatttccaagtaaagttcaaatttatttattaaaactattatactttaatagtttatccaaaagataaaaataatccacaaaatttaaaatattaaagattttatcaaggaatctatatgccgactcaattaattaatagagaaactcagaatatatattttaaataaaactgtgagtttcatatttagtaaaaaatttattaaatgtaaaactatgttaaaaaaatatcaattatataacaaaaattcaataaagagattaaagttaaatgtgtattttttacacagtaaagatagtcaattgctaattaatgtttaaataataacttatttaaacattaattagcaatttgaatgttaaagaattaacgtcttaaaaatgttaatttaaaaactattctttaaattaaaaatataaaggtttataataaaacaaaataccaaataattcattaattaataaggtattacattttatgtattatattgaatgctatgaaaacgtatatttgtgaggtgatatatttatgctatattttttaactggatgaaagttaatagaaacgtatcgtgtaataagttataagcaattttaaggagtttgataacgatgaaaacagaacaaggcctagtaattgaggtggttggaaattcggcaagaattaaagttggtagacatagtgattgcaaaaactgtggtgcttgcccgggaagcgaaagtctaatcttagaagcgaataataaaataggagcaaagccagggcaaagagtaattcttgaaataaaagaaaccaatgttctgagagcagcttttattgtatttattctgccgttgattgctttatttattggtgtaatgttaggagggtttataggtcaatatataggagttaataaatttatgttccaagtgattggtggggtagttatatttgctttatctattgttattgtaaaacatttcgataaggcaagtgctgcaaatgaaaagtccaagccagtaattattcgcattttatgatagatttatttctcgatatttaaataaaaaattgatgaactattatttattcaagtatatattactcatattgtaaatattatttacttgtattataaatattatcttacgaattattgtagttatgtaaatttaattgtaaataatttattcttaagaggtttgtgaggcgattattaatgttaaaaagttttctcggaggaattcatccgaaagacagtaaaaagtatacttctgataaagccattgagttaccaccattacctgaaacagtaactattcctatgagccaacatattggagcaccatgtacacctatagttaaagttggggatatagtaaaaaaaggacaggtcatagcaactagtgaagcatttatgcatagtccaatacattcatcaatatcaggaaaagttacaagtattgcagaaatgccacatacatcgttagtaaaatgcttatcagttgttattaaaagtgatgggttagacgaatgggtcgatggaataccattagaacgagattgggaaaatcttgagaagaaagaagttcttgatatcataaaaaatgctggaatagttggaatgggtggtgctacatttcctacacacgttaaactttctccaaacaaggaagttgatacatttatcgtaaatgctgctgaatgtgagccatacttgacagcagactatagaatgatgattgaatatgctgaccgtatagtaactggagttaagatagttatgaaaacactaggagttagcaaaggaattataggaatagaagataataaaccagaagcagtaaaagttatgaaagaagcatttaagggtacatcagttgacattgtagctctacctacaaagtatcctcaaggtgcagaaaagatgcttataaaagtgcttacaagtcgagaagttccatcgggtggattgcctatggatgttggagttgttgtacaaaatgttggtacagttatagctatttatgatgcagtagtaaatggcattccaataattcaaagagttactactgtttcaggagatgcaattaaggaacctaaaaatctattactaagaataggaacaagttttaaagaagccataagttattgtggtggatttagcaaaacgccagagaagctaattatgggagggcctatgatgggaatggctcaattttcattagatgttcctgtaattaaaggtgtatctggaattctagcattaagtaaagatgccataaattctggtgaggagtccccttgtataagatgtggaagatgtgttgaggcgtgtcctatgggtctaatcccaagtatgctaagcatattaggtgaacgtcataaatttaaagaggccaaagaagaatataatttgctaaattgtattgaatgtggaagttgtgtttatacatgtcctgcaaaacgtaacatagttcagtatataaaatattcaaaatcacaaaatttagcaatggcacaaaaaaagtaaaggaagaaggggtaaaatgagttccgaaattggagtacaagaaagtaaagtgcaaggaattaaagcaaaagaagctgatacacaggaaaatagttttactgtatcagcatctccacatattcgttgtgatgaatcaatctcaaagataatgtggaatgtaaacatagcattagcaccagctgctattttttctatatattattttggtatccctgcattaattaacttagttgttggtgcagcttcagcagttgcttttgaatatttggttcaaaaattccgtaaaaagaagatcacagcatttgacggaagtgcatttttaactggattattgctagctatgtgtgtgtctccaacgttacctgtttatatgataatagcgggttcgtttgtagccatagtaatagctaagcattctatgggtgggcttggatataatatttttaatccagctcatatcggaagagcagcattaatggtatcttggccagttgcaatgacaacatggacaaagatgacaacttcagtagatgttgttagctctgctacaccattgaacatattaaaacaacaaggatattctaaattgattgaaacttttggtggcaatacagaattgtataaagctatgtttattggcacaagaaatggaagcgcaggagaaacttcaacaatacttcttataattggaggcgcgtatcttatatataagggatatataaaatggcaagttcctgtatgcatgataggaacagtaggaataataacatggattttcggaccttcaggtttatttagtggtgatcctattttccatatgatggctggaggattaattataggtgcattttttatggcaacagatatggttacagcacctataactttaaaagggcaaataatttttgcagtgggagctggactaataacatcattaattagattaataggtggttatccagaaggcgtttgctattcgcttttacttatgaatgctgtaacaccactaatagatcgttttgtaaagccaaaacaatttggagcaagggggtagtaaaatgtccaatgaacatgctattaataaggagtattctatttttcagatagcgataaatttaataataacttgcttggcatctggtttaataataggactagtatattatgttacggcaccaattgcatctgaaaagagagaaatatcaaaacaagaatctatgagagcattagttagtgatgccgataatttcaaggctgttccagataaggccgattggtttacagccgaaaaaggcggtaaagtaattgcatatgtagttccaggagaaagcagaggatatggtggagaaattaaaatgcttgtagctattacaccagcaggagaagtaatagattataagatactagcacataatgaaactccaggtctaggagataatgcttcaaaagaaccttttagaagtcaatttaaaggaaaaaaagaagcaaatttaacagttacaaaagatgcttctgataaagatgatattcaagctatgacaggcgcaactatttcatctagagctgtaacattagctgtcaaaaatgctgtgcatgaagtaacagagtttgcaggaggtaaataatatgaaggaaaagtggaaaatttttagcaagggtttgtacgatgaaaatccaatatttatgttatgcttaagtctttgtcctgcattagctgttacatcgtcagtgatcaatggttttactatgggcttatgtgtaaccttcgttattacaagcaataacgtagttgtatcgcttacaagaaaatttgtaaacccaaaggttagagtaccagtttatattacatttatagctactatagttaccgttgtagaacttgcattgcaggcaatatcacctgaattatatagtgctcttggtatttatttagacttagtagttgtttttgctataatacttgcaagagcagaggtattcgcatcaaaaaataaagtgtttccatcattcttagatggatttggaatgggatgtggttttacactagctatgctttcaatatctgtaataagagagcttttaggaagtggatcaattcttgggtttaaaatactaggctcatggtacaacgcgcctttaattatgatactaccagctggtgcatttatactaataggttatatgataggagcaataaagctccacaatgcacataaagaagctaaaaaaatagaaggaagtgaagcataatgagagagtattttacattgtttataggtgcgctacttgtaaataattttgttttaacaaaatttgttgggctttgtatattttttggagtttctaaaagtttagatgcatcaataggtatgggaatggcagttacctctgttataactctaagttcaatgttagcatgggttgtatataattttgtacttttgccatatcatttgacattcttaacaactattgttttcgttatacttatagcaagttttgtgcaattattagaattaattataaagaaacaagcacctacattatacagcatgtggggaatatatcttcttttaatagcaacaaactgtattgtattatcagttccattattaagtgttgagtcaaactactcgtttgtaaaaagtgtagtgttctcaattggatcaggaatgggatttgcactggccttagtacttatggcaagtttaagagaaaagctggtttatgcagatgtgccaaaaccactagaaggaacaggagttgcttttatattagcaggtatgttggcattggcattcttgggattttcaggaatgatataaaggagatgagtaaagattatgtttactgttataatggttttagtggtccttggaggaataggtgcggtttttggttttatcttagcatttgcaaatagaaaatttgctatggaggtgaatccactaattcatgaagtagaagatattcttcctaaaggacaatgtggtgcatgcggctatgcaggatgtgcagcatatgcagaagcagtagttatgaaagatgatgttcctcctaatttatgcgttccaggaaaggatgctgtagcaaaacttgtagcagaaattacaggtaaaaaagcagaagaagtggaaccaagaatagctcatgttagatgcaaaggaacaagtgaaaaagcagcattaagttataattacaaaggagttcatgattgtaaggcagcaagcctaatacaaggaggaccaaaaggatgtaagcatggatgtattggatttggaacttgcgtaagtagttgtccttttggagctatgacaatgggagaaaatggacttccagttgttaatagaaaaaaatgtactggttgtggtaagtgtgaagaatcatgtcctaaaaatgtcatacaaatgatatcaataaatgctagagtaaaagttgattgtaattcaaaagataagggatctattgcaagaaagttatgtagtgctgcttgtataggctgtggactttgtgcaaagaattgcagctatggagctattcaagttcaaaataatctcgcagtggtggatcagaaaatatgtgctgaaaaatgcagtgaagcaacatgtttggcaaaatgtccaacaggagcaataaaagttgcgaatgaattaattgctaataaaaattcagacacagtaaaagttacaatttaaaatttacagtattttatattaaattatggtttaatataaaatatttattaaatgtatagccagtagagatgaaaaaatgtgcatttctactggctatacattttgtaattagtggggcattgtagtaaacgtatgagagaatttttattattaatagtgataaaactcattgactaatatttaaatcattaaagaaaggaagcttggacatatgtttgactataaaattagaagttataccaataaaaatacctgtaccaattccggctatggataagattggtaaataaagtgtaactgcaatattttgaactataattgcggctacaattaattgtcctacgttgtggaaaaatgctccagcagcacttacacctattatactaactttatctttcccaatattttttacgaaaagcattatataaaaactaagcaacgctccaacagcaccatacataagtgtagagagatttccaccaaacatagttgaaagaagaagccttaatattataattaaaaaaacatcttttttattattcaatatgtataatgctatgacagtaattaaattagttaacccaagttttgcaccaggtgcaataaatggaacgggaatcatactttcaattgtatacaaagccaaagcttgtgatactagaatacctataaatactatacgaaaagttttattcatttaaacacctcaaactgtttgccattatatcactgctttttatttcaatcataagtttatgtggaagacaaactataatttggcctggttctgatataaatccagatctaacgcatattttatccttgcaatcggcatctattactttaatagatttatctttgacgtctattatattatcaccgtatgaagttttaatatctatttggtcctcacctctatgctcagataggttgattttcttataaaatttaccgtctatagttatctcagcatatgttccattgtaatgtttgcccattattaccccaaaaacaagttcaggaataagtgatatacatagtagaataactattataattatatcccattttttaaacatattatttccttctttaatctataaatttattatacatttttgacaaaaattttaaaatatattatggttaatattgtatattaagttaatttttaaatcaagaaattaattatataagttttaaacagtataacgtatcctagtattagaaatactcacaaagcttgtaatttactaattactgctataaaataataaacaagattgtgaacacgtgtgtaattattgagcgtaaaagaaattatttataacctctagctatatttgcgtactaaaaattaattctttgctagagataaaagcgctttatttattaaaaatttggaggattaatatggctactacgattaaagatatagcgaaagcactaggaatatcacattcaactgtttcaagagtactgactggatctaaatctgtaaatgaaaagaccaaagaggcggtacttaatgcagttaaagagctaaactatattcctaatatgaatgcgaggagtttaaagatagataaagcttataatattggtgtatttttttcaactataagtaatggaacctcaccatttgtatttcaaactgttataaataatgtgtacaagaatatagacaaaaagtataatgtcattgttaaaggaatagatatgtatgaaaaaaatactataaatcctaaaaattatgatggaatactagtagtaagtcaaaaaatagatgatgatgattttattagagaaatattagagaaagagatacctattgtagtcataaatagaaaggtaaatcatgatgttataaatgtatatacagatgagagtgttggggtgtataagggagtagaggaattaataaaaaatggtcataaggatattgcaataatagaaggagcaatcaatttcgattcaactaaaatgaggcgagagggatacttaaaagctttcaataactataatattaaattgaacaaaaatctggtgctaaatgggaactttactgtcaaaagtggatatgaaaaagctaatgaattaatagaaatgaatgaaaagttttcagctatatttgcttttaatgatgaaatggcaactggggcaataaaagctattacagagcatggattaagggttccagaagatatttcaatactaggatttgatgggaatgaaattggcagatttattactccaagtattacaacaattaaaaggcctataggagaaatagcaagaattgccactggcttacttttaagattgctaaataatgaacgggatataacaactaagaaaatatatatagaatcagaattggaactaggtaattcaattaaagatttaaattagaataaattatataaagctatagtgaagcaaaagttttcctcactatagctttaaaatttaattcaaaatgagaataaaaaactattgcaaatatttacataagcgtatatacttgtattaagaaatagggaacacgtgtgcaaaggaattacataatattaaggttaggaattttagtaaaaccttcttgataaaatgtatatataaactttgaatatttttttactcaattaggaacacgtgtgcctaaaaattataaggagagaatattatgaaaatggaaattcgatactcaaatcatccagaagactctaaacgctatgatacagaaactttaagaaaacactatttagttgagaaagtatttgtagatggagaagtgaatttagtttatagccataatgataggatcatatttggaggaattacaccagtaaaagaagcattaaagcttggagcgtctaaagaattaggaacagattactttttggaaagaagagaacttggagttattaatgtaggtggagaaggaacaattatagcggatggagtagaatataatctaaattatagagatggattatatgttggacaaggcactaaaaatatagaattcaaatcagctgatggaaaaaatccagctaagttttatataaattctgcgccagcgcttaaatcatatccaacagtaaaaatagatttagaaaaagctaataagataaaatgtggcgatgaaataaacatgaataaaagaacaataaaccaatatattcatcctgcagtatgtgaaagctgtcaattagtaatgggattaacaatacttgagccaggaagtggatggaatacaatgccatgtcatactcatgaaagacgtatggaagtatatttatatcttgatgtacctgaagatcaagcagtaattcattttatgggtgaaggacaagaaacaaggcatatagtaatgaagaatgagcaagcagtaatttcaccaagctggtcaattcattcaggcattggaactcagaattattcatttatatggggaatgtgtggagaaaatataacatttgatgatatggataacataagaatccaagacttgaaataatataattaatactaacataatcaaaagaacaagtttctgcatactaattactaaattgcagttataattatatggtttaaaaatgatgagacatagttctaactaatatggtaatagttaaacgcagaaactttattatggaaggatagttttaagaaaataccatagtacatgtatgattatcttaaaactattgcacatacgatactataaaaatttaaatacaaatgataggttggtatttttaatgtagaaataaatttaaaatatagtaagttaaaggagggatgaaaatatagcaatatataagtaaactagttatatagtcattgaaaacgttgtgatgacttaaatctaatggaatttattttggtagtttttacaaaaagattagtatgaataatgttgtgttatgagtatatcaatacaaatgaaacagttatgagagttaaactatagtatttaaggagttgttattatgaaaattaaacaaaatattgagaaagttcctggaggtttaatgatagtgcctttatttcttggaacattacttaaaacgctttcaccagatgttaataagttttttggaggatttacgggtaattttttaactggaacatctgttattctattcatattttttttctgcataggaacaactattgatctacggacatcaggttatattgcaaagaaaggcatttcattattgataggaaaggttttatttgcttcattattaggagtactaatgtcccatatacttccggataatggaatacaaacaggaatcttatctggactttcagttttagcagttattgctgcatttaatgagacaaatggtgggctttatctagcattaatgacgactcttggaagaaaagaagatgctgctggatttccgtttataagtatagaatctggacctttcatgacaatggtggctatgggtattgcaggaattgcttcatttccttggcaaacattagtttctacattgattccttttgcattgggtattgctcttggaactttggatcatgattttcgtaaaatgtttgctccagttgttccggctttgattccattttttgcatttactttaggatttagcttaaactttgggatgattattcaatcaggatttatgggaattataatgggagttgcagtggtagcactttcaggtggattattatcccttattgatagatatttaaccggatctgatggtgttgcaggttgggcagcatcatcaactgctggtgctgctgttgcggttccttatgctatagcacaagcaaatgcacaatttgaaccagttgcagcttcagctacagcaattatcgcaacaagtgtattagtaacatcaatattaactcctattgtaactatgtggtttgaaaaaagagcacgggctaagggattaccaattaagccatctaagtataataaaaataaagaagttaagagtagtttaagtgaaatttctgcataaaagatgttaaataaatttattcaaaagctgtaggcatagatttggcctgcagcctttttattctttagaaatttatattccagtaaaatcagtggacgaggtactccttgagggtataacttaaaaaaggttgattggatagtttgggtatttaatacagaaaaaattatatatatattgtgatcataaatttatagttaaaattttggttagataagtacttagttaggacaaaatatagaaattcgatttcaacatatagatttcaattaagagagctataatttatcagtatgaagataggtagctaaagaattgaaattattaagtataaatggtaaaatatatattaatatcattatctagcattgatttttatattagtgaaaaaggtcctaaattagaaaatatacaaattaaataatcaaggagcattgctatgaagcttacttttagattaaaactattcttttattttgtaggaattatattgtctatatctattccaattgcactaataacttataattatatgtataaatcccttaaagagcatctattttcaagcgctaaagcccaaatggtgcaggttgataacaacttttctaacatgttagggcaaataaagtacaatgctaagtttcttgcaacttattcagatgcaaaaaaagcagaccaatctatttcagctctatttaatattcctgatattgcgataaataaaaaatattcaaaacaaatacctgggatagagagtactatatataatgtgcttgaggcttatggaacatctcatccagaaacaacttatgtgtacattggtactaaatggggaggatatattcaatggcctgatggattaagtactaatacatttgatccaaggacaagaccatggtattctttggcattatcaaatcaagatgaagtggtaatttcagatccatacgtttcggcagttgataattccaaaaatgtaattataagtgcgtcaacaacagtaaaaaatgaatatggaagcattgttggagttatgggtatagatttaagtttggaaaagttatctgaaataataagaaatattaggattggagatacaggctatgtttttctttatttaaaagatggaactatgttagctcacccagatatagatttaaactttaaaaatatcttacatttaaatcagttaggttatacatattctcaaacagatgaagcttcaaaattttcatttgataactatgataaatttatagatttggataatggaagttttgaaacttatataaatggagatcctgttttagttaatgtttatacatgtaaggatactggttggaagatggcttcagttataccaaaaagtgaattggaaagcaaagctagcaagatgggatatttaataattatgataacagtgggtgtttcatttctcgctattttcgttacactcattgttactaagaaggtaacaaaaccgattacagaattagttcctttaatgcaagcggctggaaatggggatttatcagtaaaagctagtattaattcaaatgacgagtttggaaaattaggaagatctttcaacttgatgattggtaagttacgttcaagctatgaggaattatcatcagtttatgaggaattgctggcgacagaagaagaattaagagtacaatataacgaattacaacaaaatgaggaagcacttagagttagtgaagaaaaatacaaactcgcactagaatgtgcaaatgactcgatctgggaatggaatttagttacagatacattctttgcttctgataaattaattgatattactggatacaagttggatgagataaataatttgagaaactttgtgtatgagaatgttcattcagatgatcttgataaagtgaaaaaagatttcaaaaatcatattaatcagcttacagatgtttatagctctgaatttagaataagaactaagagcagttcgtacgtttggattctctcttgtggtaaagcgttaagaaattctgaaggaaaagttataaaaataactggttctattagagatatttctgaaagaaagatttcagaggatagaataaaattcatggcgttttatgattctttaacaaaacttcctaataggacattgtttatgaataggctaaatgaacaactacaattatctaattacgccaataaacaaggaattgtattttttatagatctagataattttaagaatataaatgatactatgggacacgagtatggagataaattgctaataagtttagcaaaacagtttgaaaatttaattgaagaaaaagatacaatatctagacttggtggagatgaatttatattacttcatcctgattcaaaagaagacgaaatacaaacttatgcaaacaagctattaggtttgttcgataaagtatttaaaattgataacaagcatatgtatataactgcaagtgttggaatagctttgtatcctaaagatggaagggatagtagtacaattttaagaaatgcagatgccgctatgtacagggcaaaggaattaggtaaaaatagattttcacttttcgatccagaaatgtatttaagtcttgaacgaaagactagcatagaaagaatattaaggacggcagttgataataatgaacttatcattaactatcaacctcagtatgatttacaggctaataaaatatttggctttgaagcattacttagattaaatagtagggaacttggttttatatcccctgcagagtttattccaatagcagaggaatgtggatatatcacacaattaactttatgggtgcttaaggaatcttgcagacaaagtgctaagtggtttgaagcaggctataaatttaatagcataagcgttaacatctcatcagttgatttacaagagacaaatttcttagataatgttaaagaaattattgaaagttcatctgttaatccgaatatgattgaacttgagattactgaaactgttcttatgaaatcatttgattctagtattggaatattaaagaaattaatggacatgggaattagaattgcgcttgatgactttggcacgggatattcatcattaagctatcttagaagaattcctataaatacattaaagattgataaatcatttatagacaatatttcttcaaataagaaagaagaagcgattataaaaaatattattcaaatggcacatagtatggaattaaaagttattgctgaaggagttgagactgaaggtcagcttttaatacttgaaagaatgaaatgtgattatattcaagggtattattttagcaaacctcttcttgctaatcaacttgaagaattactagaaaaatagaaaagtgaataagtatgattacatttaaggtgttaaaatataagggtcacatataagtataagattcctataaatgaatttgtattattcatttgtcacataatattaataagtatacagaaataaataatttcaaaagagaacagggaggaaacaaatgaatcaaaaatatgtaaaaaaatccaatgaagaattaaagatgagtctgacagatgaacaatatagaattacacaagaaaatggtacagaagctccattttctaatgaatatgataatcagtttgaaaaggggatttatgtagatataactacgggtgagccattgtttgtatcaaccgataaattcaactctgggtgtggctggcctgcattttccaagccaatagatagaaaggtaataaaagaaaaaatggataaaagtcatggcatggtaagaacagaggttcgaagcagtactggtgatgcacatctaggacatgtatttactgatggacccgaagatatggggggattaagatactgtataaactcagcagcacttaagtttatcccaaaagacaagatgaaggaagaaggttatgaagaatatttagataagatactataatagtagcattatcatcatgatattaattataagtaactttaagagaataaataaagctaatatttcataacggcggtaaataatatatcgccgttaaaatttaatcaaaaaccaaattatatttctattttttctgaatcttctaatacaatcaaatcttctgggtaaggattaaaataagtttgttccaaaaggtaatcaatattaaatctaactacataggatttgactaaaagcataggagacattattgtaagttttttcatcttgtatttttctaaggaatcaagtaataattgagtttcttcattagttatgtattttgaaaaatatcccatggcatgcattagaacatttatattatttgtatacttaggaagtttttcgaatgccaaattcaaatttttctcatattcagccataatactttttatatcattattttcaccatttgctgtaattctgcctaagattttagtatacttttgactatttgccatgagtagtaatttatttctgcgttgaaaatgtattaattcattaagtgaattagattccttgacttttctaaaatctgcattaataaaaattcttgtaagaaaattatctcgaattctataattatgtaatctgccttcatcttctattgctgcataaggaaatttctctttaatcttatttccaaatattccggcacctcttgtgcttcctgtaaccttagctgtgccattataaatttttacatttttatgtccacaggagggtgagccgctttttaagagaaaaccgtctatattatttaaatctttcaaatatgattctgaaaactcaatcatttcttttgtgaattcttttccttctttcggctcatataattttaatttactattttcagagacaactctaattgttggtcgtggaactttaagtcctatagaagtttctggacaaacatttataatattaacaaaaggtttcaatttttcaacaaatgcatcagttatcatttgtccattgtaacgacaggcttcgaaacctaaacatttactaaaaaagacatttggtttaaaaaaatcacccatgaaaacactccttttttcaatttacttataatattgtcattttataagcaagtaattcattaaaagtgtcaataatagagaaatcatcgatttatcattattgacagtattagattttaagggtaggataaaaatgaaatatttctggaaacgactttaaatatttccagaaggaataacttttaaatatataattaatatttacatagaaaggattttttatatgactaaaatagatattatttcagggtttcttggggcaggaaagactactttgattaaaaaattaatagaagaagcgtttcagggtgaaaagcttatgataattgaaaatgaatttggcgagataggaattgatggaggatttttaaataattcaggaattgaaataacagaaatgaattcaggatgtatttgttgttctttagttggagatttcggagttgcacttaaagaagcattagataaatattcaccagaacgtataataatagaaccatcgggagttggtaaattatcagatgtaattaaggcaatagaaaatataaaaagcgaagtagatattaaacttaatagtttcacggcagttgttgatgctgtaaaatgcaaaatgtatatggataactttggagaattctttaataatcaaattgaaaatgcaaatactattatcttaagccgaactcaaaagatttcagaagaaaaattagaagtatgtgtatcccaaataagagaacacaacagttttgcaacaataataacaacaaactgggatgagattaatggaaagcaaattctatctgcaatggaaagggaagagtcccttgaaaaagagcttttagtagaagtaaagaatagtaagtctgaaaatcatcaacacagcgaagagtgctgttgcaataataagaaccatactaaggaagaatgtgaatgtgataatcatgaacatcatatagattgtaattgtaatgatcataaccataatcatcatactcatgatcatgagtgtggatgtggacacgatcatcattcacatgatcatcatcatgcagatgaagtatttacgagttggggaatggaaacaccaaaaaagttttcaaaagtagaaataaataatatattaaaaactttatcggaatcttctgattatggaattatattgcgtgctaaaggtataatcccttgctcagatggaggttggataaactttgatttagttccaggcgagtatgaagtacgtgaaggaatagcagattatacaggaaggttatgcgttataggtacaaatttaaataagaatgaaatagaagaattatttgatgtatagatacaagctaaatatttgggatttatataagaattgtgattaaggaagaggagtgaacattactgataatatagataaccaaatcaataaatatatgggctagtctatattcttaatttttaagttggatatctatatagataacacaatcataaactatacttagactatgaaatattctccaatcagaaatgagtgatatacttttgtggaatgtttcattggtaattttgatggatgtgattctttggctataagttgttccaaatgtgctagttcaaaaagtgagaatcgaaattttatatttcgttcttcgaactttctctgtgagcgcttgttctttgaagccagcactttgggtgcaactttatagccttagaatcacccatcataattacctagaaactggaacaaaagtatattattcatttcgatgaggtatacgcataagtctaggttatatattgcttatctataataaaactcatctctttaatgaattcaaataatttaaattcatttgagtttatttagtgatattatgacatttttttgacttatatctgaagaaggactttcatcaatttcgatttcagggatatttagagaatttttctcacctaaggccttaattatccataagatttttttttgatagtcctgtagtaatttcctattcatggacattacctcttttcatagaatttaatatgtagtaggttacactaatataaataaaatatacattaaatgaaattttaagataaagtatttataattatgaggaaagaaatttagaattagcaatagaaattcataagaaaatacaatttaagttctgaaatattaaaaaacttaaattatgaatgtaaatttatagatagaattatgttacatttaattagaaaaataagtgaaagaaggaattgatttatgactgatgtaccagtttttcttattactggttttttagagagtggtaagactacttttataaaagaaatatttaatgatccagagttttatgatggggaaaaaattcttttaattgtttgcgagaacggtgtagaagaatatgaagtggaatttttgaaaaaacacaatgcaaatattgttagcatcagcaatatagaagaatttacagatttagcattaaaagaattcaatcagaaatataaaccgaccaaggttgttttagaatacaatggaatgtggcaatttgacatttttgataatgtgaagtttcctgatagatgggagattgctcaaattataacaactattgatgcatcgacatttgaaagttatatgagtaatatgaagtctttattaatagaacaatttaagaattcagatttgattatatttaaccgttgcaacgataaaacaaataaattgaaatttagaaatagtgtaaaagctattaattcaagagcaaatatgatgtttgaattggaaaatggtgagattgatgatagtcctttagaattgccatttgatatacatgaaaaagtaatagaatttaaagattacgattatggggtttggtatttagatgcaacagaatatccagaaaagtatgatggtaaaaatataaaggtaaaaggtcttgcttatagcaaccctaagtatcctaaaggtgtttttgcatttggcagaaatgcaatgacttgctgtgaagatgatatatcatttttaggtatcctgtgtcaaacgagtaaggcatttaattttaaagataaggaatggatcgagttagaaggtataattcataaaaaatatatacagcaagaacaaagggagattccatatatagtggttcaagattataaaaaaatagataagcttgaggaagaattaatttatttttaatagattagccatgtatataaacttaatatataaaagcaggtacattggaaattttcttaatatacctgctttttctgtttgttaaatttataaatttgttgaaagtttttaattaatactggtgtctttttcgataaactttgcaactccatcatcatcgaagcttgagatgacacttgttgcaaccgcctttgcttcagaaactccattttcaggaacatacgaacgatctgcagattgcaacatttcaatgtcattaaaattatccccaaaagcaattacttcatttgcaccaatcagttcctttaattcttttatagcaatggccttagatgctttaaaactaaatatatctaaaaagtaattatctttatatacatttttgttaggaacacattttaatatagggttatctaaaatgcaattttcaacattttttatacgatcaaaagaaccatacaaaacaaaatataaaattgtatacccatcctttggaacttgttcaaaatcatcgtattgatgacaacgacctttgtataataaatgcctttctgcaaaatactcaagatcagatgggtcatcaagattgttgtatatgaagtggatatctccatcttttaatgcatacataaatccataacttttatactcatcaaatatttttattagatgatttaactgagatattggaaattcattaatttttagatattgctctttatttaaatcataaaatcctataccgttatttaatatgataggaatgttaattggaatttcacttatcaatctttttgcagcctgaaggtttcgtgcagttgcaatactaaacaatgtacctttttctatttgtttctttaagatttttagtgatgtttgtgaaacttctccattagaatttaataaggtaccatctaaatctgttacatataatattcttttattcatttattgcacccctttatataagatagaagatttctgtaaaataagtattaagagaatttatattacagtaatttatatattgtgagtttagcataagaaagctgccaattcaaggaaaataaggatatataaatccattaaagttcatgagtgctgacattcatgaaaaaattgacaaatgactattttaaaatataatttattatagtatgtaattaaaagatagttagaagtgaaaggacattttatgtatcaagaagaaagattatatgaaatattaaatatacttagagaaaaaactgtgttatctaataaagaaataatggaaacatttaatatatcaagggatactgccagaagagacattgttagattagtagacgaaggagtggccattcgaactcatggaggaattgcagtcccatctataagaactgaaattaaggattataagagccgcttatctataaattcagaagaaaaaataaaattgggtgaatatgcagctaaatatgtgtcaactaatcaagtatgtttttttgatgtgtctactactattgaagcgttatgtcagcgtgttggagatgatatttctatatatacgcattctttagacaatatggaaatacttgctgaaaaaaattgtgacgttcatttattgggtggaaaattgcaacgtaaaaatcgttttttatatggcagtggcacaataaatcaaattgaagatatacattttgatatagcatttttgggagctgcggcaattagcgaagatggaatttatgtagttgactttgaggattcatatataaagagaaaggtagcagaaagaagcacttttgtatgtgttatagctgatggtgaaaagttctttaattcgagcacgtttaaagctatttcatttgatagaatagatttattaataactacaaaagagccgcctgagaatatagaaaaaagaatgaaagactcaggaactgttattgaaatagtgtgatattataaaaaatgagaataaattattacgtaatttattctcatttagcttaattaaattttattttgctgctttattagtccttttctgtaagcattaagaagcatctttaagtcatctatttgttgcttgagagttacacctacatcagtatcttcaactcttttcctatttacaacttgctctagtaagagagttgtggataatatgtcagtctcttcttttatggctgcttcggtggattcaaatggctgatgagatactaactgaagcccaaaagagttatatattaacgtatatccagctagtccagttttgggctgatatgcttttgaaaaacctccatctataactagtagagttccgtttgcttttataggactttctccatttttttcttcaacgggcatgtggccatttattatatgagattcaggtgaactaagcccaaattcctttagtatttttttgcagatatcctcattatctcttaagctaaaatagggatctttcttttcataatgagtttctttttcttcaataaaatactgttcaaatattgtcattctatccttaccaaataatggcgaagaagcaccgcaccacaaataccacattatatcttttttattatcagaatcatccttgtcttttgaaaaataggcctctcttgctagcatatccaatttgtctaaaagttctttacctttatattctttatcagctatttttacttttttaaagcttccatcttcatttaatggtatgaatccatgatatagtaaattggaattaaattttaaatataaacttccatttgaatataggaatcgaacatgcttattatacttatcgctattaataaaagaggtttttaacttatcgattaattctttctcatcataagtaagttcatatggatttttagggtctatagtaggaaaaaatgaatctttcaatttatgcgttttaccgtttaagttaatagttccttcagcataattaattttatttaataaaagcctatgattcatattaaattcaggatgccttaaaatcacctgaccttcaagtttaaataatattatagctatagctttgtgcatttgagctattaaattaatttcattaatgctgtattttttatcacaatccatcttaggtaagaagatattacagggatgatccttataaaaatccatagaaaaagttgctagagggagaaggttaattccgtatccattttctaaagtatccaagttagcatactttagagaattttttataacattagcaatacatacgtctgaaccacaggcagcacccatccataagatatcatgatttccccattggatgtcaacagaatgatattcaactaaagtatccataataatatcggcacctgggcctctatcgaatatatcccctaaaatatgaagcctgtctataacaagtctttgtatcaatttagaaagagcaactataaattcctttgatctatctgtatctataatagttctaataatttgttcataatattcatatttatctattcctttaggctgttcatgtaagagttcttctattatgtaagtaaaatcttttggaagagcctttcttacttttgaacgtgtatatttagaagagacatatctgcatatttcgattaatctatataaatttattttgtaccaatcatctatgttttcttcttgcttcaatactatctctaatttttgttcaggataatatataagggttgctaaactttttttctcactttgcatcaagctattaccaaaaagatcttcaatttttctttttattactcctgatgcgttttttaatacatgaataaaaggctcatattctccgtggatatcagttagaaaatgttcagttccttttggtaaatttaaaattgcctgcagatttattatttcagtagaagcttcgttgattgtcggatattgtttagaaagcaactctaaatatcgtaagttgtcagatatttcattagttgatagatcgtattttttcattattacatctcctttgttgctattaagataatatcttctataactaattaaattatagaagaaggtttgataataaacaataatattaataaaataagagcttaaagtgaatcaagctcttatcatcctataaatttatattttacttataccaacaagaatcataacagatctaggttctatttcaagtgtctctccaacttggagcatctcattaattgaatcgctaatgtcttctccagaaggcatggatgtatttacagcaattcgccattctaagtatatagggagttcgggtaatcttacatattgagtttcccaatgagcattgatacaaaggtacacaatgtcatcttctttttcttttttattccatcctgcaaacattatcccaacagttctagtactatctgacgaatctaaataccaaggttctataccgtgcttactaacaggaggtaagccacatcgggattcttcaattctgtccttaatagcaggatgacgttttcgaaaatttatcatatttttaaagaaagtaaataaatcatgatttttatataggagactccagttcagccatgaaatttcattatcctggcaatatggattgttatttccaaactgtgtatttccaaattcatctccagataaaagcattggagctccttgacttgaaagaagaacagcacaagcattttttattagctttcttctcaactttattatattttcatcgtcagtttcaccttcagcaccacaattccagctattattgttgttctcaccatctgtattattccaaccattttcttcattgtgtttatcattataagaatataagtcatataaggtgaatccatcatggcaagtaataaagtttactgaagcatttttccctcttatatctggattatagaggtcataagatccggtaattctttcagcaacagtggcagctaagtctgaatcgccctttagaaatctgcgaatatcatctctatattttccattccattcacaccatcttttccaagatggaaaactgccgacttgatataatccacctgcatcccatgcttcagctatcaattttgtatttgcaagaatagggtcaaatgctagactttgcaatagtggaggattattcattggtgatccatcttcatttcgaccaagaattgaagctaaatcaaacctgaatccgtcaacacgatattctgtaacccagtagcgaaggcaatctaaaatcattctatggactattgggtgattgcaatttaaagtatttccacatccactggagttgtaatatttcccatctggtgtaagcatgtaatagacattattatcaaaccccttaaaagatatatatggaccatactcattgccttcagcagtatggttaaaaacaacgtctaaaataacctctattccatcttcatgaaatttctttatcaatgattttagttcatcgccttctttatttcgttcaattccagcagtataactggtgtttggagcaaagaaacatacaggattatatccccaataatcacaaagcaaattacctctaacatatcttgcatcaagcatttcatcaaattcaaaaattggcataagttctacagcattgattccaagctcttttaaataaggtatcttttcggctaatccagcaaatgttccaggataattaacttttgacgacggatgcttagtaaagcctcttacatgcaactcgtaaataatcaaatctttcataggaattaaaggtcttttactgtttccccaatcaaaatcattggagacaactcttgatttatattgatttccacatattgtttttgttccccatacgctttgtccagcaattgcttttgagtagggatcaagtaaatatttactactattaaaaactaatcctctttcaggtatatatggaccgtccacactatatgcatattcgaattcttcaatatctaatccaagtactatcatagagtatacattacctattcgataatattcaggaaaaggaatgacagcataaggttcacacatagcaggcttaaataagagtagtttacatgatgttgcgctctgagagtggatagtgaagttaacacccccaggtataactacagcaccattttctagataaaatccaggacgaattttaaatccctcaaattcgtcggtggggattaaatttttctgaagcgtttttacaaattcatcgaaatttacagtattttttaaggtatttatatctagttctatattctcagcaattgaaaatttagaagtatccataatatattttcctccttgatattattaggatcctcttacttttattatattagaacgaatatgatttgaatcagtgaatgaaatcattatttaattattacttaaattgttgtattaagattccaatttacatgttttgaactaattaagttagaaatatgggattaagatatttaagttgtggtataatttttatataagctattaattgcacaaaattggttatataaaaaataatctctgatgaagggtaatatattatagataataaacaaaatgaagaatgttttgtataaaacaaatggagaaactatatacactataagatttgggaatgagggggaaatagatgactaaaaaaataatttacagtttacttattgtagcagcggtagtttctgcaatgccaaaagaagtttcagcagaatggaagcataataatagtggttggtggtatgaggaaggaaaatcctatagtactggctggaaacaaataaatggatcatggtactattttggtaatgatggttatatgaagactggatggattttagataaggtttggtggtattatttacaggataacggcgctatggcatctggtaaaacatcaattaaaggtaaggattatgagcttgataataatgggaaatggataaataatgctcttcctaataaaaatgttaatatgaacattagcagacctccttcagaggaaaaaatgagtacaaccccagattttagcttgtttgatgaaaatggaaatacgtattttaaaattcaagatagctattatttaaaaggtgtatggaatatagatggtaatatatatatttttgatgaaaatggtgtgttgcaaaaagacgaatatacgtcggaaagtggtagaaaatatagcttgggagatgatggcaaggttatagaatgtcttagtgacaaaaattataatttatgtccagaatatgcactgactactaaatcaactacagagaactacgaagttaaattagatgatagtaatatgcttactataactgatgtcaattcagatgacccagaaaaggatggagtaagaattgaagatggaacaggttacaaattagacaataccaaaccaaaggcaactattaatggaaacactttatattgtagaactaatcaagctatagatttaggaatgataaaagtaagtagtgtagatgataaaagttcatcatttcctaatttaatagcattgtctaagagtgaagatgatagtgttgccgtttcaggaataaatttaagtttggaggatggatttttcaaagagatttatccaacagttattgcatacaaagcaggaaaaactactattacaataaatgttaatggaattaagacttcgtttgatgtagtagttactgaataattttctacactaatatgcgtaagtttaatattttcataattgttaagtttagtatatatgacattacattaaaatataaattcaaatagaggaattaggaatatataagtagcaataccaacttaaatgaaaaagaatataaatattatattttgactagttacataattttagtaactagtcatttataattttgaaaagaaacttatttgtcaattaaatttttttcatattcctttatcattttctttgtcatcaatcctccaattggtccacctacacgtccgtttaattttgatgacttatttcctttataattatcattaagttctatgccaagctcattctcaaattctatttttaacttatctagttttgctcttgcttctggaactaaaggtcttctactcataattttacacctccatatcagtattagttttataaatttatagtaaaatatacttaataaattgttgaatttaaatggaggaaacttgtgaacaattaatgcaaaggaggattttaatactttttttacaagtatttgcatagattaaaatttgtgatagtggttaatatattaatgccaaacaaaatcatagattaagggaggtagattaagatggcttcaagaaataaaactttagttccagaggcaaaaacaggtttaaacagattaaaaactgaggtagcttcagaaattgggttaaataactatgaaaacattgataaagggaacctttcttcaagacaaaatggtagcgttggcggagaaatggttaagagaatgatagaaagttacgaacaaagtctctaaaaatagatacttaatgttttaactcagttcttaaattaccatccatcctaaagtgaaagctggtagaatatagttaattactatttattctactagcttttttattatatatgaatttatattcaagcgaaatatatgaaaaataaaagagaataaaagaaattagaagcatagatgagattctgaaaaataatgaaaataaaatgagatagatggcagaaaatttatatggaattactttacaatatggtataaaatgtaaaagaaggcaattaaacatatactcaaaggagttgaataatatgttatatttatatactatatcaataaagttaagttgtttatccttaatattactattatttaggcttgttttaaacaagaataatattaatatttttggtaacaaggaaaaaagaggtctactgataaccatacttattattagtattgtgccaataatcaatatattttttgcagcttcaagtatatatgcgtcaatttttatgaaaaaggaaaaatttataaaattcatcaatgaatagctttagtagaagctttaataattaactatccaaagtatgatcgaaatagcgacgattatattattgtacttggcgcaggacttgatcatggagtagttcctaatttaatacttcgggaaagacttgatattgctataaaatgtatgaaagaaaatttagcccaatatatcgttttatctggaggacaaggcacagatgaaagtatatcagaggcacaggtcatgagtgaatatttacaggctaaagggatagaaaaaacaaaataatattagaggataaatcaagagatactaatgaaaatctaaaatattctaaagaaaagattgaagaatttagtaacaaaccaataagtgatataaaagtaaaaatagtaacaacagactttcatgcttttagaaggagtgttttagcaaagaagaatgggtataaaaattttgataattattcaagcactatgccttggtattttgtaccttcaacatatgctagggaatccacttcagttattaagagtatattgcttgacaaataaatgagtgattgtgaaataattatactacaataaggtccataaatttaacttacaacaacaaactattacaagcacaagatatacataattaatatataataatataaaggattatatatttagttagaaggggataagtatgttggcggtagttattttagtttgcatagtattaattgtatgtaatgctttttatgataccgataaaagttgaaaaatagaaatcgtcaagcaaaattagactaactttataaaactaaatgggattttttttaaaactaagcagatataatttaaggctatctattcattaagatagcctttttgtgtttatagaaattaagaattaacatggtaacttgattacaaaagtagatccttttttacattcactatatacctctatttttccaccacataagtcaataattctttttactagggctaatcccaaaccgttgccttcagaagaatgtgatttatcgccttggtaaaacttatcaaagatatgcttttgggtatcttcgttcatacctatgccgttatctgaaatgcttgttgtaatccagtttttatctttctttaaagtgcatctaatagtaccatcttcaggtgtgaattttattgcattactaagtatgtttatccatacttgcatcaacagttcttcatttccatgaaaagtaattgagtctaaatctatatctaagtcaatatttttgttggaccatttggattctaaaagtaatagagtttgccttagttgttcatctaatttgaatctgcttctttctgctattatatcttgattctctaatcttgagatctgtaatatgctgccaactaagcttgatagcctttttgtattatttagtattttatctgtatatttagacttttcttctttacttagattgttatcctgtagcaaagttgtgtaaccttcaatagaggcaaggggagtcttaaattcatgagatacattagcaataaagtcacttcgaaaggtctctatgttatttagttcgtctaccataatattaaagttttgagacattttttttagctcttcaacgtagtaatacttatcttcatctaatttgatattaaaattaccttttccgacttccataattgcttcactaaattttactagtggagctaatatttttttacctattatagctgatatggttgtcccaactattatactaattatagatagatcgataattggccaaagaaacttattagcttccgaagagaaatttggatgaaagaatatagctaaaattgcagtaagtactgatgatacaaacattattgaaaaaataataaatgaaaagactagtcctaattttaaatttggtttatcattcataattttttaccaccttatatccgagtccccttacagtcaaaatatcaaaatctatgttatttttaaagcgatcacgcaaacggttaatatgtacatctactgttcttatatcagtttcagaatcaagcccccaaaattcatccataagttcttgtcttgtgaatatacgattagggtaagaaataagcttatataaaatataaaattccttttgtggaaggactgttgcctcaccattttgatatactgacaaggaatcatattcaagcatggtatcaccaacactttgctttctttcactaataatctgagcccttctaagtaatgcacctactcttaacaccatctcattaacatcaattggtttaaccatgtagtcatcaattccaagaagaaaaccacgttgtttatcctgaaatctttccttagctgtaatcattaatataggcagattaaattgagcatcacgaatagattttattagttcaaagccatccatatttggcatcatgatatcagaaataattaaatcgatatattctttatccaaaacattaagtgcttcaattccatctttcgcaccagtagtcttatagccatttttaagtaaaacagttgaaaataattctcttaattctttatcatcttctacaatcaaaatatgaaacatttatatacctccattttatgcactaattatactacttttttatctatgtttaaaagtatcatatctatatataaattcaagtatttaattatagataaaatatttactataataattaaatttcaaataaatagaaaagtttaaattcagttaacaattctatgatacactccatattaaaataacataagtagcaaatgatagctatagataaataataatccaaacaattttaggcagatatgttttgtaactcataaaaattaagatattttttaggttacaaacaaagtataaaaattaaaagtatggtattattttcatgtacatataaaatatttcaatgatttatttgcatgtgaatcattgactgtctggtcggtcatttaaataaaatgtgaatataatgagtcagtaatttattgtaatacagtatttttataagtgaggtggtttttttggcaagattgaaaaataaggaaaatgaaattcttgccgctgcaatagacatatttttcaaaaaaggtttttcgggaactaatatgcaggatattgcggacaaggcacagataggtaagggtacaatatatgaatactttagaagtaaagatgatttatttgtacaagctttaaagtacgaccatagaaatttcactatgaatgcaaaccagaagatatcacaagaagaatcatttcttaaaaagctaggaaagcttatagaattaactgagcatgctgttatagaaagggctggaaggataagttattatatagcaaatgagatttcagaattaaatcctgaagcaaaacgtgatcttgaagattttataaaagatataaaaagaaatgggagaaatattacatacaatattttaaagcaaggaatcgaagagggggaggtaaggcatacaggtatagatattgattttgctacaaatgttataggaggaatggtggcattacattgtcatcggacttgtcatgaaaattattattcagtagaacaaagaagagaggaaaatgaaaagcttataaatttcattatggatggaattggtgcaaagaaaaattaattttataatatataaattaacaaaataaactatatgtttacagattaggagtgtgaaacatgaaaaatgtaaaaaaaatagttatatatgctgtaattgttatagctgtaataggctgtgctgcagtagctaaaactaagttattcacagctaaaaaagaagcaaccactgccgttgctgctagtaaaactactgttgaagtacagattgccaaagcacaagaaaaaagtttaggggattcatataaagcaacactagaagcttatcagcaaggaatagtaactagtaagatagcagcaaaggttgttgctgtgtcggttgagaatggacaatatgtaaatgctggtgatactatagctacgcttgatgaccaagatatacaaaataatataaaaactgcacaagctcaggtagaagttagtgagcagcaagtcaattcaacgcagcaacaactaaattcatcgcaagtaacgctacagaaattgcaaattcttatggacgatgcacagcgtaattatgatagacaaaagactctttttgatggaggcgctatatcaaaaacagatcttgaatcagctgaaaaagctctaaacacttctaaagctgattatagttcaggattagcaagtattgaatcagcaaaagcaagcattgaaagttcaaaagcaagtttagaagcacaaaaagtaaatttacagaaggctcaaaatgatttggccaacacagtgattaaagcacctataagcggagttataagcgataaaaccttaaatgtaggacagatggcatctcagggagcggcccttgcaaaagttaatgatatatcgtctgtatatgcaacaatacaagtgccacaagagaaaataactggagtaaaaataggtcaagctgcaacaattaccgtagatggaaatgataaaacatatgatggcactattgaagctatggactctgcagcggatgctacaactagagtattcaattgtaaagtaaaaatagataatggcaataagtcactgttacctggtatttttggaaaggtacagcttattagcgaggaaaaagcacaagttataactgttccgattagtgctttagctggtaacgaaggagattattctgttttcttaaatgacaatggaacagctaaaaagcaaaaaattacaattggtgaaactaatgaaaataacgttgaagtaacagatggtattaaagaaggggatcaggtaatatgtactaatataagtacgcttcaagagggtagtgaagtagatgcaattataaaggatgatagttcttcagataacacagcttctgaacaagatggcggtgcagatgatacaacaaataagtaggagggataataaatgaatatagcaaatattagtattaaaagacctgtatttatatcagttataatgattgtccttactattttaggctttgtatgctataagggattgacacttaatgatatgccaaatgctgatatgccttatgtttccgttgtagtaacagaaaatggagctacaccagaaaatatagaaagtaaagtaacaaaacagatagaagatgcagtacagcaaatttctggagttcaaaatataacttcaagtgtaagttcagggatgtcacaaactgttatagagttcgatttaagtaaaaatggtgaagttgcagcacaagaagttagagataagatttcaagtgttagaggtaaattaccaactgatgctgatgatccgataatttctaagtttgatatgtcggcaacatcaattatatccatagctgtttatggttcaactgataatcaaaaaatgacagactttgtagataatactctaaagccaaagttatatgcggtatcgggtgttggagccgtaaatgtatctggtgaggatacaagagaaattcatataaagttagataataataaattattacaatatggccttacatcaggtgctgtaataaatagtattaagagtgataacattgatcagtcaactggtaaagttattgatggagataaccagatatctattacaacaaatagtaaaatacaaaaagtggaagattttaagaatatcttggtgtccaacaaaaacggaacagagattagagtaaaagatattgcaacagttgaagatgggattgttgaaaaaacaagccaagcttactatcaaggtaatccgtcaattggtattgatatcgttaagcaatctggtgctaatacagtagaagttgcaaaagaagctaaagcagcattagaacaagttaaaacttcattaccagaaggtatgcatgctgatattgttactgataattcaacatcaataaaagatacagtagatgatgttatgaatactattatagaaggatgtatattagcagttgttattgtatttttattcttaaatgaatgggaaagtacccttataagtgcatcatctcttccgatatctataataactacttttatttgtatgaaagagatggactttacattaaatactatgtctttaatggcattgtcgctggcagtaggacttttaattgatgatgctatagttgttatagaaaacattgtaaggcatctccatatgggaaaacatccaattgatgctgctaaggatgctacctcagaaattggatttgcagtaatagcaacaactttagctgttattgcagtattcttgcctatggcaatgatagctggaataattggaaagttcttcattgagtttgcacttacaattgtttttagtatggcagtttcattgtttgtatcctttacccttgtgccaatgatgtcatctagaatgcttagatcagaaagaaaagaaagtaaaacatttattggtaagttttttgggtggtttaattataaattcgatctttttgccgagaaatattcacatttattagcttttcttcttcataagaggataacagtcttggctgtttgcgcagttatgtttgtagcgagtctttcgcttattccatcattaggtttcgtaatgatacctataactgataaaggacaaataacagttaatgctaattttgattcaggaataacattagatactgcaagtaaggagactaaacagattgaagagattgttaagaaaaatccagaagttgaatatgtatattcaacagtcactaatagtaaagcaacagttaatattacattggtagataagaaacaacgtaagattagctccagagatatggcgcaaaaacttggaacagatctaaagatactgcctggaatggatattacagcatcagctgcatctatgggaggtggtggcggatcctcaaaagatgtagccattaatcttgttggtgatgatagagcaaaagttcaagcttttgcagaaaagatgaaagcagagatggctaaagatccagatgctactaatgttggtgttaataccaattcaggtacaccagaggtaaaaatgactgttgatcgtgataaggctgctgatttaggtgttaacagttcagacgtagctagtaccttggctacattatttaatggttcaactgtaactaagtatgatggtggaaaagatagatatgatgttaaagttttgcttcaagatgagcagcgtaaaaatcttagtaatcttgatggaatttacgtttcaggttcaaacaataagcttgttccgctaactgaagtaactaaaaaagttgttggaacaacttcttcaacattacataggtacaataagcaggcgcaagtcgaactttcttgtaatgtaagaggtttatctactggaactttacaaaataagtatttagctaagataaaaagtgaattgccggcgggagtttctttgtctgttggaggaatgaatggaactatgcagaagagtatgattagtttggtgcaaaattcagttttatcagttcttttattatatttagttatggcagcccaatttgaaagttttgttgaccctatagctataatgttcgctctaccactagcattgattggagcaataataggattatatgttggtggaagtcaattaagcatgatggcagcaataggtattgtaatgcttatgggactggttgctaaaaatggtatattgcttattgatgctgcaaaggaaagaattaaaaagggaatgccaagaaatgaggctttagtagaagctggtcttgtaagattacgtcctataatcatgactactttagcaatgatatttggtatgattcctacagcattagctacaggagcaggtactgaaatgcgtaagccgatggcacaagcggtaattggaggattaatcacttcaacaatattaacattattcgtagttccaatagtttatacaatacttgatggattgaaaaaaagatttgcaaaaaaaattcatagaaaaaaatcaacaccaattgatagcgaatcaaatgtaagcatataacaaagaaattactaattttaataagatcatactaaaattaagttttagtatgatccatatataaagtgtattagtttaaatacaaagttcaggagcaaatcctaaattatgactacatttactaaacaataaaattgtagtaaaataaagctacaacagaaaaataatctagtaaataaaaagagaattcgaatttatattaaaataaatattaatgaagaggagatttatacatgagaaaaaatataaataagataatagcatttgcaatagggattagtgttatgagtggtagcgttgtaccagcacttgcagcagattcaactcaacaaacaactactagtacaagcactgcaacaaattcacaaatcgtaaacggaaagcaactgcttactttagatgaagctataaaagaggcaattagtataagcgaggtattacaacttgatactagtaaaataacttaccaagataaaactaatgacataaatgaagacttggatgattctaaagatgttagtggagacgaagaagattttaatgatgatactagagaagctaatgcaaataaagctaggcaacaaagggattttgatcaagatgctttaattcaaaaagttactaaagcatataataatatcgttacaagtcaaatgaaaatagataaagctggaaaagaattgcaaattaaaaacaagacattaaatgatgcaaaacttaaaagcagtctaggaatggtaacatcaagtgatttgaaatcaagtgaacttgaaattgaaaatttacaaataacacagaaaacaagtgaaaatacattaaaggacgctgaatatagctttaaagtattgacaggtaaggatgtaacacaatatactttggaacaggatattccttatgaaacattaaaaatagatggatctatagatacttacctagataaagttatagataactatttaaaatacagggaacaaatacttaagcttaagaaagatcattattatgattctgataataaaataagtgacggcgatgtaagtgatgcaaaaaaaataacagatgaagctcaagaacctaaattaagtgattataacggaaatattgaagcttatctcacagattacaataaatatcaagctgctaaaagtgcatatgcaaatgccatatcggcacgtttaacttatttaggtaatagacttagtgtggatcaagaacaaacaagtatagatgaggacaaaaagaactttaaaaatcaactaagaacactttatacaaatcttattacagcacaagataatattaattatattaagcaaaatatagaattaagcaacaagaaccttagtgatgcgaaacttaaatatgacttaggaatgataactgaatctacttataatacccaagttttgagtagtgaagatttaaatattcaattaagaagccaaattgatgcttataacacgctaaagcaagaaattcaaaaaccttggatagcattttcaggagcacaatagaattaatataaagaacatttataatacttaaataaatattagattagttacaaatctgatggttaaaataaaacatattaatttaaatttcagatctttagagagctaaagacttcaagaatatattcatactaattaccatattaataaaagtaattagtatgaattattataatatataaaagttcagtggccttaagacggtacaaactaagtttagattataatatttagtttgttttttttattaatggtggaaaatgttaaataaaaaagggagaattttagggtggaaattaaagaaaaaattttaaagtcatctataaaattatttatggaaaatggtttttttgaagtatctattagagatatttttaaacaaattaacataaataaaagtgctttttataagtattttaaaagtaaagatgagcttatatataaagtgatagaagagttttgttctccatactttgatgaaattataggcgctaccaatttatgtaatgaatccacaaaaaaaaagctgaaaacaatttttataaaatattgtggaataataccatatttaaaaaagattctaaatataaataaatttaactatattgctgtcacatttataacaattgaaggattaaaaagttacgaaaataaaaatttagtaaatgattttaaccatagattattggaagggatagacaatgttgtagaagaaggaaaagaattaggtgagattttaccggcaattgattctctatctacatcaaagagtattgtgtcgatgttgcaaagttctatggtactttgggcaatgaatcaaaatatcgatataaatttattattcaaaactaattttaaatatttgtggaaaagtatcggagtaagtccaatttaaatttattttaaagcaataactatatttaaagagagagtctctttaaatatagttattatcatttatttagcaatttttagtttttctcataaaatcttctgagtttacaataaaccttatatgagaaccttttccgatagtaccttggtcatcacttgcttccacatcaaaaaataattttttaccatctacctttgtaagggtagatttgcattttatatttgcgccaattggagacgatttaatatgttttacactcatgtcaattcccactgtagtatagccacttggaagttcctctattactaaactttttgatacattttccattagagcaatcatagcaggggttgcatagacctctagatcacctgatcccatttttatagctgtttcattttctgtaactttaaactctttgatatatgaagtaccttcatttaaattaaattccatcgaacaaatttctcctctcaataaatatagattcattattagatatgttacattataataattttatagtactaaatattttcatatttttcaagaataataaaaattggtaatgattaagaaaaagactgtgttttttaaagaggtgtttttaatattaaaataaacctttcttttaaggttcatggttttaagtataaattgttttaaagttaaaaaggaaaatttataaaaattacatatgaaaaataataaaaaagtaagcgaaaaattaaattaattatatttcaaaagtagtatattagaaattgttaataaaaaataactagcagattaaattccactagttattttttatatatgcacacgtaaatatttactattaataagttgtatatattaaaaatataattttatcgtctcaagttatcttcgtaaatatctttgttagaagatggaggagttacacgaacatatgcatattcaggagctttataccctggaccatatatcaaaaattcgataattttcttagcaaaagccttagagagtatttttttcatttaacatcactccttacctatatgttacattaattatattggaatattcggaaaattgcaacattttattaataaataataattattatccattataatacatttatttttgtggaataaaaaggaataatagttttattattccagtattattataaatctatgatgtatatataaaatttattaacttttttacctagtaaattttatatatacaattagagaataaatactggtatagttcctatcatagttggctaaataaagaagttagtaagctatataagatgatgttgacataagtttcctctacatccagagtaaatcaattgattgaaaattacattaattgtataattttagatgaattgattgaagcggattaaaaaataagtaagcacttaatgaaaattaaaaggagaatgatccatgtgaatattagaaagaaacttacttcatttatactggttttattaactagtataagttttggacaagtagtaaatgtacaagctgcaactactgattcaactgtagtatctagcaatactgttagcaagatatcagatgaaattcctaatccaggtatacctgaaaataagccaagtgaattaaatgttatttataaatatagtacccaagatattgtaaatagtaatgatggaaaagttaacataacatcaactattgggtggaaaaaagagaatggatactggtattactataaatcagataatacaagagcaactgggtggataaaaccagataacaagtggtattatttaaaatacgatggaagaatggtaactggctggtttaatgtgaatggaatatggtattatttggatcaatcaggcagtatggttactggttggagtaagttaaataatgtttggcatttcttaaacggttcaggggctatggtaacaggactaaataaaattgataataaaatttatatgttttatagtagtggtgaaatggctacaggatggtataaatcaggtgataattggtattactctagcagtagtggaagcatggcaactggatggattaaagataatggaacttggtattatttatatgatactggtgcaatggctaaaggatgggttaatattgatgaaaagtggtattatttaaaatctagtggagcaatgtcaacaggatggataaattctggaaatgatacttattatttagataaatcatctggagctttagttacaaattctacaatagatggctataaaatcggttctgatggcaagaagatagggccaggaaatccagtcaataataattctgataccttattaaaaggtatagatattagtcactacaatggggacatagattttaaaagagtcaaagcttcagggatccaatgtgtatacataaaagctacagaagggacaacctatgtggataattatttgggaattagttatagtggtgctcaaaatgctggattaaatacaggtttttatcattttttagttgggacaagctctcctgaaacacaagcacgtaatttttacaataacataaaggataagcagaatgacctaaaacctgctttggatatagaacaagatggatttgatgtcatgggttatgcattaaggttcatagatgaattcaaaaaattaagtaatatggacatttgtatatatacatattcagattttataaaaaataatttagatagtagattatctaaatatacattatgggaagcaaattattataagagtccatttaacttatcagctaatagtgtatggaattctagagcaggacatcaatatacagataaaggtgttatcgatggaatctatggagatgtagacttagatgaatttacacaagatattcttagcaattaaatgtttcacccaaaaagcaagcaaagcagcttaaaagaaaagctatccttaaaggatggctttttttttatatgcctcaaaacgaaaaaattctttattataatcaattaatattattgcaatagaatttttttactaattaacaaaggaatttactgaaagttttcaccataatattgtaacttttttgtaacgcttttagtttaaaaatcttttataatttaggtaagatatagaaaacgctaaagtatatattgagaaaataattcttcataataattctaaaaatattacaagaattttagccgtaattgtgaaatgagcagtgtgcattgaaacacatatattttttgaatttttaagtagattaattatatacaaaaaaaataataaaaattagttaggagaataattatgataaataaaattcaaaagagatttaaattattgttttcagcagctataatatgtgctatcactataagttctgcaagtatagtggggtgtagtcctaaaaagtcatctgaaatagatgctgaaaataaagaagtgtcagttgagaaagtttcagaaaatagcaatcaagcagaaggtgaaaaaatatcagaagaagtagtcagcattgaaaaatctgctaataatgaggataataaagaaatagtatcttcacaagtaaaaaagaaaaatgattcagtaaaaataattgaagatagcaagtctatggatgcctcaaagtcggataatggaaagaataattttacagaatatataaatctattaggttttagtaaagatgaacttataagtacattaaatgaaaagccaagttctataggagaaggtggagtggaatttaaaaaagctggtattagagtttggtttgatcagaaaaataatgataaggtagagcaaatctttactatgagaaatgatttgaatttaaatggtgtaaagattggtgataagataagtagatttaaagaagtttttggaaatccagttagtgataaaagtggagatgcacattttaagtataaaaatatatttttgtctgtaaattatgatgcaaacacaggacaaacctatgcaatatatattttaaagaatgatttttagtaaattaaaaactactttcttattttaaaattataggatgatagctaaaagctaagcattgaagcacaggaatttagtgaaaatataataaaaacgtatagttaacataagagctaaaaattatggatatgaagtaattatatatcatggataaggtaatactaaataataacagaatgaaaaatggggtgtatatgttatgagaaaatatgcaagagttataatactgattatttctttagggagtattataacaggctgtgggaatgttgtaaacacaactagcttaattcaagcccctatgctcgaaaatgtagaagaaaataaaattaataaagagctaaaagaaattttaacgcctgaaagtgaattcttagtacctaagaattcacaagaaaaacaaagtatttttatagatgatgttgataaagacggtaaaaatgaagcatttgtattatatagggatatgaaagaaaatagacaagttcatctattaatgcttaaagaagaaaatgaaaaatggaataaagtacttgatgtagccactaattttaatattcttgattattttactcttaaagatcttgatggggatgggaaaaaagaagtgattttaggtacttcagtatcagattctgaattaagtaaacagttatttatatatgaattgaatggaaaagaattagttaataaagttaatcgtacttacgaatggatagatatatcggattgcaatgaagataagaaacctgatgttataataattgatggagaaataggcaaatcaaaaacagcagaaatgtttaattatgaaaataatcaattaaaatctcacacgtttgtgggtctaaatcctgagggtgtaattgaaaatgtcgttagtggaaaattagcagatgggaataatgcgttattcattgatagtgcattaggggcccattcaatgttaactgaaattgttacttgctataagggaagatttattaaaattggagatgaaaatgatggtattttatttaaggcttacccattatatagtagagatatcaacaatgacggtattatagatgttggaggaatgtatattcctaaaggttttgaagatgcagcgatggcagaaatcccttttatttatacttactctgattataaagaagatggaacacatgaaattgtagaagaaagatatacagatagtgtgcagcatttctacattacaattccttccaaatggcatggtaaagttacaattcagaagcttgatcaaggtgttagacttatagataatgaaagtcaggataatttatttgaagtaaaatggataagcaaaagttcatatggtgagaacaaaaccaagcttggagaaacgaaggatactatattttatgatgatattaaagaagaacaacctatttcaaaggaaaattttcatttacttaaagatgaattttaatggaggaaaatatggaaacaattcttgttgttgaggatgaactgtcaattagaagttttatctgcataaatttaagaaagaaaaagtacgaagttctagaagctgagaatggagaagaggccttatctatttttaataatagaaagattgatattgtcttattagatttaatgctcccaggaattgatggatttgaggtgtgtcagaaaattagagatataagtcaatctgttgggattatcatgttaacggcacgatctcaggaagaagatagagtaaagggtcttgtagaaggagctgacgattatttactaaagccatttagcatggttgagctagaggcaagaattatttctttagcgcgaagattgaatcatatatattcaaagaaagaaagcttagttattaaatcggggccatttgagcttgacgtaataaataaaaaagtaactccaacagaatattgcttacttcaatttttaataaataataagaataaggtatttacacgaaatgatatcttggatgaagtttggggaataaattatattggtgatgaaaaagttgtcgatgtaaatataagacgtatacgaaggaaaatagagaatgatccatcagctccagagtatttatgcacggattggggatatgggtacttatggaaggagtaaaactatgaagcgaaggatcattgtttactttatgattattagtttacttacattaagtcttgttatgatagggtttggaattggaataaggcaatattattaccaagggattgttaacacatttcaaagtcaagtagaggcaaatctttctgtgttagcaaaagaaactgattttactaataaaagtttggcggaattcagtagtgaaattattaaaaattataagattaatggctccgaactacaactattaaaaagaaatgggaaattaattcaatcatctacaggtttttatgaagataaaacttatttgatagattctgatgtattggatttgaaaaccacatataaaattgagaaaaattcatattcaggtcaaaagattatagcagtatatacacctcttgtttttgacgggcaagtattaggaattttgcggtatacaacatccttaacacaagtaaatgctttaattattaatctgttgatttatgggattatcatctgcatttttattgctgttatcgtgttttttgtaagtttgcgtttagggaatataattgtagaaccattaaacgatattatcaattttacaaagaaaatagcagagggaaaatacaaggaaaaaattaaggatgcttatccaaatgaacttggagaaatagcaaaaacgcttaactatatgggcgatgaaatattaaaaaccgatcgtttaaagaatgattttatatcatcaatttctcatgagcttaggacacctttgacaggaattaagggatggattgaaactatgcggaatccagacgaattatcagatgaggaatttaaatttggtttaggaattattaatgatgaatcagatcgacttattaatttagtagagaatctattagatttttcaagatatcagtcagatagaattaaactaatcttatctgatgtcaaaatagacaaaattattcgtgaagtaaccttccagcttcaaaagaaagcagaaaaaaaggaaattaaattagtggttgaaacgcacccagcaattattacagcagatggtgatagattgaggcaagttatactaaatgtattagataacgcaattaagttctcatataaaaatcgtaaaatctatgttattcaatcagttagcgaagagtacattttaattaaaattagcgatataggtattggaattaaaaaagaggatataaatcatgttatggagtcattctataaaattgatcctaaatctattggcgcaggacttggattggtcatttctaataatattatagatatgcacaatgggattcttaaaattgatagtgaatatgggaagggaacaacagtgacaatttcacttccgttagaaaactttaaatcctacgtaaatgcttagattaaattaataattattagctgaaatttttagacaatatagaaaatttcagctttaattttgttataatgatgtatacagtagtaagttttatgatataaaagaaaaatataaagtagttattaaaataactactaaatttgaatttgttgtacttatgataaaatatatgtttcaacaataaatctatatttaaagctttagtaagtcagacactcaattaaggatagatgtagaaacttaattgtgacataaatatatttataatgagatatttgttttaaggagtaatttttatgaaaatgatgctttttacactagaaatagtaggtgaagaaaataataaatataaaattaaagtcagtaacggtactgagaactccttagtagaatttaatcctttaaaaaaagaattacattttgtagataataacaacctaagtgatttctttaaaggacaggaataccaatttagaaaaatgctacataataagcggccagatacatattatgtagggtttaatgtaaaagtagtcataagagaagataaagatgtagctgcttttaatgataggagtaaaatcttagttttagataaacgaaatagtaattatgatagttatgcaatagaggaaagtaaggctgaagagagaatctataaaatctacacagatgccagttatttagagaagaaaaatcatggtggatttgcttttataatagaagatttgaaaggaaattataatttatatacagaaaaagtgaaagacataggaagcagccaagctgaacttgaagcagcaatgaaagcacttgaattattaaaagatgttgaaaaaataagaataataactgatagccagtatgtcagaaaaggactcacagaatggttacctatatggaaattgaatgactttaaaactattaatggagaaccagctaagaatatagaaaagtggcttgattttgataaagcttgtaatggaaaatatattgaatttcagtgggtaaaagcacattctaaccattttgagaattctctctgcgacatgtatgccaaagatatagctaataaaaattcaaccagctactaatagttgcaagaagttaatacgttataaatattaaagcttagtaatattataagctctacttatctaatacccttaatggaattgtaaacatagaaattttataaaaaatttgcagacaaacataatgttagtatataattgtgcatgttggaattttatatagtaattatattatttaagaggagatttagtcgtgcaaggtagatgttattattgtaataaagaattaactgaaagaacaattaaaagacatgcaaagagttgttcagtaatgaaaaaatcaattgaagaaaagatgaattatactaaaggggtaagagagcaattcataatatccatgaaagataagtataatcctagtttatactgtatttatgtttcgatagatgcaaagttgcaacttcagcatttggacaaatttataagagatatatgggtagaatgttgtgggcatttaagtgctttttatattgatgaagaaatatatcatgacaatagtgatgaacaatatgagatgaatttttatttaaaggatttattaaatattaataaaaagttcgaatatgaatatgattttggttcaactacttatttgactttagaagttgtagatataatacaagtcccaaatgaatttagccaaatggaagttattgctagaaataatccagaagaaggtaaacttaataattctccaagagatgggagttgcgggtatataggaaataaagattcggaaaaagaatacttgcctggaaataacaataaatacaaagttagtaataaaaagccgatacataacaatgatgctttttcagattttgacgattctgaacaaatgatagagaatgattttttaaaacattataataaatttacaaatagttttatacatacgtttttcaaggatacatattcttttgacctagaagaattgatcaagccatatcctaaaaaagaaatttgtagcctagcagagaacattggtcttaaattatcatataatttgaataaaaatcaggtaattgaaaaatatattgatgaatatgaaaaaaatatcagaaataaaatgaatgtgattaatgatgatatgtataaaatattattaaaatacattaagaataatggaataatttcagtttctgataatgaagcagaaaattatgcggataaacatgctttttttatgaatcaagggatggtatttccgtgcttaaaagatagaaaaccaatcttattaatgcctgaactaatgcaggccgttgttaagcaatgtgataccctagagtttagaaagttaatgaagaaaaatagtgaaatcatgaatatctttagaggtatgattaagttatatggtgttctttgttttgaagatgttaaaggattaatgaaaagatatgacaatgtagaagagcaaatattgttatctatattagaagaaggatctttttattataataatgaatattatggtacaattgacgatgacggaaaaattatatttgttaatgtggaaatagaggattatgaagaaatattaaatgatatagacaataatttggattattctatgattagtaaagatgatctaatttccatgtctaacgaagattatttggaaagaagtagtattggaaggaagttttcaaaagaattttcatcgatgtttttagttgataaaaaggatgctgctggaactatgaacatgttggctttggatatacaatatagaaattctgaagaaatacttgaagatataataaatggaatagatgcaaaacttgacaaggaagatgaaattagggtatttaatattgttaataaatttattaagaatataccattatggaaatataaaggtgcaaatataaatgaaaaagaaggaaataacaaaacaattgaaagcaaaaaagagattggaagaaatgatccatgcccatgtcaaagtggaaagaaatacaagaagtgttgcggaaagaatggaaatgtaattcaactattttaacgaaatttagttataaaaatacatgatatattcaattttgtatactttgcttttagataaatatattggcattatttataaatagaatattaggaatgagggtttatcaaagatagacccttattttttcttttgagaagtaaaatgtgaattaaattaaaaaaagtctaaaaattcgacaataaaatgttatttgactatgatataataatgttgtggatatataaggtattactaaagggtttttgtaaaatgaataaaattatggaaagggtggtgttgcgtattatgattgatattaaaaagggattaaacaaattctatattggagaaacggaagaaaatactttagcagaagtaatattaagtgatactagtaaggatgtaataaaaattgatcatacttttgtgggtgaaaagttgaagggcaaaggagcaggcaaacttttaataaggaaagttgtagattttgcgatagaagaaaataagaagataataccagtatgtgtttttgcaaaaaaggaatttgataaaaataaagagtatgagagtgttttgtataaaaacgattaatgggtttaaagaggtgttatatggagaaagtactgaagaaaaaattaaaagtaggtataagtgaatgttgttttggcgcaaaagtaagatacaatggtaaaggattcgattatgtcaaaaatttcggtagagaaaatgagcaatttgtattttatcctatgtgtcctgaatgtcttgctgggttaggggtgcctagaatacctataagcataaaaggtggtagtggacaagatgttttagaaggaaaagccaaggttaaaaataaaactggtgaagagcttactgaaaagcttataaaagcatgtaacttttgtttagaattattaaagagtgaggatatatatatctatatgtacaaagagggaagtccaagttgcggagtatataggactactcttaaggacaaaagacttggaaatccacctggagtattaggagccatgttacttaaagaaggattctttttagtatgtgcagatgatttagaaagcccaataaaaaggtgggatataagaagaagattaaacgcttttgtttgggcaagagaagtagaaatagagaataaaaatcaactttataatgtatggcatgctctcaaatttttatgtcaagaactagatgagaaggcggctagaagtttaggaaacaagttatcaaatttaaacgatactcaaaaagaagatattgaagaatacagacaaatgatccttgatattattagaaagccatcaactttaagtagaataaaggcatggttatggaaaaattatagttactatagaaaatataaaggtatagaacttgatatagtgaaagaaccaacagatctaagatcaaatacaattttggctgaagaactaattaagttagaaaacaaactatataatgaaggatattctttgggatcgagtccaattatttatagaggaaaaagatagaaatatgcatattgtgtataaaaatgtagaaataaaggttatgaaagtgcgaaagaatagaaggaaaaaaggatatagatgttgaaatatatataataaggtaattagcctaataaatatttattgaaatgatagcgaggagagagaatttatgaaaaaatttgtttgtacagtgtgtggttatattcatgaaggagaagcagcaccagaaaaatgtccagtatgtggtgtgggatcagaaaagttcatagaacaaagtggtgacttagcttttgctgatgaacatgtaattggagttgctaaaggcgtcgagaaagaagtgatcgatggattacaggcgaactttattggagaatgcacagaagttggaatgtacttagctatgtcaagacaagctgatagagaagggtatccagaagttgcagaagcatataagagaatcgcatttgaagaagcagaacatgctgctaaatttgctgaattacttggagaagtagtagtggcagatacaaaagctaatttacaagctagagtcgatgcagaacatggtgcatgtcaaggtaagaaggatttagcaacacttgctaagaaattaaacttagatgcaatacatgatacagttcatgaaatgtgtaaggatgaagctagacatggaaaagctttcaaaggacttttagatagatattttgcataaagaaaatatctaaagttgttaacaaaaatattcataaaggtggattaggtagaaatacttaatccgcctttatttattctttcgtcaaaatcgtgtatgtacagaaacaatacattaatatatgttaaactaattttaagctcagaatagtataaaatgtagctcatattatttaaaaaactgtagattattaagttgtctaaattatttaaaattaatcaatcaaaagcttatattaaaaaaatatgatataattattttatatctttagttgttattattttacagttaaatacagtatatatcacgataaaacatgcctaaagatatatagtatgaagtcattaagataaaaataaatgttttaaagagttaaaatctagtatagattattagttatgtaaatctgagcttttttgtgtctcatactggaggtgatattattaagactgcgttatttatattattattttcatgttgtattttttatttatttttaggaatatacggttatagaatggataaaaaatcaaaaacaaatcagatatttatatatatatgtatttgctttggactttggtcaggcggatatgcaatgatgttaacatctgataatatcaatacagcatttttttggagaaattcttcggttctagggtattgtttttttaatggactttggctatactttgcatatttactgaataatgaggatgattttgagtatatttcaataataaaatttttagcatatgttccaactacactattatttattgggaacattatagtagaaccttattcagcaatgactaaggaatattatggctggattgatgtggctccagagttgtttccacaaattctatatataatatgggcgatagtaatagattttgcaggtgttatagtattgtatttaagaggaaaatattctaagaagaatagagtaaaaaagcaaaacaaaattattttaataacttgtacagtaagtatcattataggaataattacagattttattttgcctttactaggagtaactatttttccatcagcagtattaacgggaactatagctttaggtggtatttattatgcaataaacaagcatagattgatgttgacgactccgaagtatatatcagaatatatttttaacactgtaaatgagccgatttttattttaaatgagaacttcattattaaaaattgtaatgatgcatcattaagtgtaactaattataaaattgaagaagtagaaggaaaaatatttagtgaattactggataatgttgattttgacttaagtagtataacgaaaaattcttgtgcaaaaaatatagaagttaacttggaaacgaaatatggaaataacattacatgtgaattttcaggtacaattatatatgatgaatatagcgatatattaggaatattaatattactacatgatatttcggaaagaaaaaaaatattagaaatggaaaagaactgtactttaaaattagaagaagctaatatgatgcttaaaaatcaaattcaagataaaataagagctgaggagaaacttcgtcattttgtctattatgatcctcttacagaacttcctaatagaaaaatgatgctagaaaaccttaatatgcttttagaaattaaaaataatagtttcgcaatacttttcatagatttagatggatttaaaagtataaatgataattatggacatcaagttggtgacaaagttctcaaaaatgttgcggacacattaaaaggtataataagtaatgttgatataataagcagaattggtggagatgaatttgtaattataacaactgatataaaatccactacttatgttaaggaaattgctgaaagaattcaaaaagcattgaaaattccttttatttataatgaggaagatttatgtgttggagccagtattggcataagtatatttcctgaacatggtaaagatgcagatacattgattagaaaagcagatgtagccatgtatgaagttaagaaaaaaggtgggtatgattatgccttgtattcatcgaaaataaatgatgaatttcttaataaaatgaatatcaaagagaaattaaataaagccatggaaaataatgaatttgtaatttactatcaaccaattataagtttaagatcaatgaaagtgctatattcagaagctctaattagatggaaacaagctgataaaattatttctcctatagagtttattccaattgcaaaaagtgtgggtgaaataatatcaattgataattgggtattagaaaatgcctgtaagcaatgtgaaatatggcatgagctcggaggaagtgaatttagtatttcagttaatgtttcttattcgcaattaaagcaatctgagttcataccaatggttgaaaatatattaaatcattattcgtttccggcaagatgtttaaatatggagattactgaagatgaggctatggaggattctggtacaatcataggaatactagaaaggttaagaaaaataggagttagagtatctttagatgactttggtacaggctactcatcccttagctatgtcaatagattacctattgatatgataaaaattgacaagtcacttgtatggaacttggaaaaggattataaaagtgtaatgattgttagatcaataataactttagggcatagtctgaatcttaagattattgcagaaggaattgaaactcaagaacaatttaggattctaaatgaacttaactgtgattatattcaaggttacttaataggaaaaccaatggaagcattggagtttgagcatagatttattaaaaaggaaactgaaactatgaaatcataaaaattagaagtattttactaaaagataatatagatataagagctatccgcatgctaaaaatggatagctccttaatttgtataagatgtatatttgagttgtaaaattcaagttatagaatatttattaaggagattttaaatggagacaactatttattattttactggtacaggaaattcactgaagatagctaaagatttatgtgaaaatatcaccaattgtcgattgatacgcatatgcaaacgtaatatgaatataaatgaagtgacttctgaaagaataggatttgttttccctgtttactatagagggcttcctaaaatggttgcaaattttataaaaaacttagatgttaatttaggcaaatacttttttgcagtagctaattttgggagttatgctgcattaacctttgagcaaattgatatcctgttaagaagtaaaggaaaatcgctttctgcaaattttagtgttgagatgcctggaaatatgtggtttatgtattatcctcatcctaaagaagatttcattaatcgaatgaataatcaatcaaggataacaattaatattgcaagaatgattaataataattatgaaaataatattcctgtcataaaaaacagatataaagaagaaaagatgtatgaagattttaacccaaataacattgatgaaaatttctgggttagcgagaaatgtataggctgcggaatttgttctaatgtatgtccagctgaaaatatagaaattatagaagcaaaaccttcatgggaacaccgatgtgagcaatgtctggcgtgcatccacttatgtccgcagacagcaattgagtttaagaaagattcaataaataaagaaagatataaaaatatatttgttaaaaccaagaatctcctttaaaatttagtttatggataaataagtatatttttccggatggatatgttctatctgtttcagaattgatctgctcaatttcagataaacatttcaatgtaagtgatgtagaaaatcttagattgcattatgaaaaaaactagaatattgggcaagtaattttgaaaatgctttgcctgaaataagaaagactaaggatgaaacatttataagaatgtggagattatatttaaatgcctgtgcagcatattttaatagtggaaatgttcatatacaccaatttctatttggcaaaggagtaaataataattcacattgaactagagagtatatgtataaataatattatctaaaagttttggccatattttattaatgaattcttttgttagcatcattcattataggatatggctatatatatgttgaaattcacaatgcacatttcacaagtcacaattacagctaaaatttttgcaatatttttagaatccttttatttctaaatgattaattttgaataaattttatatttatatgcaacctaatcaagagtagatatataattttgagtatttatatctaatgggaggcattataatgaaaatattaaataaaagaattgcgataatattgctaactttaactatttttttattgatatctataactcaagttaaaacaatagcaagtttggatcttaacactagtagagtgtctaatatagcagtaatatttttcgtaactgatgatccatttactatgaaagttattgaaagcttaaaaaatatagaaaatgagaatcaaaatagagtgaaatttacttttttaaatccgaagaacaatatagcaatacaagatgaaatattagatgctgctttacaaacaaaatatgatttatttatattatatttaccagacagaagagaaaatgttgtagaaggtgccattaacaagattaagcaaaagaataagcctttaatactaatgaatattatacctgaagtagcatcaagagcttctaaattatatgagaaagttgtttttgtaactcctgattcgaaaaaagctggcattgctcaaggtaaaatcattgctgatttttggaataaaaataaaagcagtttagatgcaaatggtgataatatattacagtatgttttgttgcaaggtccatctgatgacccacagcccattgatagaagtaaatatgcgatatcaacacttaatgattctggaataaagacacaagaacttgctagagtaaatgctaattggtctaaggatctagctaaaagttccattgataatttgttccttaaatataatgggagaattgaagcaataatttcaaacaatgatgctatggcaataggcgctattgaggcattgcaaaaatatggttataacaaggataataagtcaaaaaatatagccgttgttggaattgatggcttacaagaagcaaaagatttaattgataaaggaatcatgactggaactgttattcaagatccaaggattgaagctgaagttttatataaagttggaatgaatttaattaaaaatttaagcccaacagaaaatacagattacaaagttgctgaaggagaaatcataataccatttccatatgatacatatatacgtaacattagtgaatcataagtagtaaaacttttttttatgatatttatatctgagattgttagcgaaaatgctttgaagtaatatttaaaaagctggtacttttgtttaaaaaataccagctttttaatattgttataagctattgattattatttgacaaccacacctacaccatttggaataactacaacatcagcatctttaccttttatgtcatatgcaatgtttaatgcttcgtcaaaagtataagcatgtttcatatgcatgctcttaatcatattcggatcgcacatatctgtaacaacgattacagtgtaattacatagaattcgtgttaaaatttgaatctcccattgatcaggaattgtttcatttctaggaacttttaatatttgttcaagaagttcttcaggagattttgaatttgctatagtttcataaaaagattgaccaccatgtccatcgttacaagcggctatcataataattactccgtctttcttgcatgtagcttctgcagctgtcataccctttacagcttggtatatattttgatctagtggatatccaccattgcttgaaattgcaatgtcagcttgtatactttttacactggaaagctccataacaaatttgcaaccttcttcgtgagcaagtttactatcaccagcaaaagcatttataatattcttatcttcatctataactacatttagtataaatgcaagatttgctttttcagcagcatagagcatatctttgtgtataggattatcttttataattccagtccttgcatgattgctgttaataaattcagaacagtgatttgccattatggtttttgctgaagctattccaggtaatatgctttttcttccaccagaaaatccagcaaaaaaatgtggttctataaaaccttctgctattaggagctcggtttccatcgctaatttatttaggaataactcaccaccagaaggtagtgttcccacatttattaaactattttcatctgttgaaatatggtttataatctcctcgttatcaacgatggtttgtccgaatttatttatcatttcttctctagttgttgctctgtgaaagcctgtggctataagaatttttatgtttatattgggattaacgtttcttattctttgtaataaaattggcatggtaattttactaggaacaggtcgtgtatgatcactagttataataaccatattatttttaccaattactaattcctctaaagatttactacctatgcaattatcaagagctttattcactatatcattttgtgaaatatcagctttataggtatttgccttggaaactaaaatgccctttagatttttatcatcaatgtttatttttaaagattttgttgagtatggaatctcgatcgaagccataaaataacctccctaaataaaaataattgtatttacactcaaattataacatacatttctataattggtaaggccaatttaaatgttttcataagttagataaaaattcattataaatatttttttgggaatttatatatgtatttatttaagtgaccgagaaatgttaagatatatacaagttctacgtatagactagtagaataaaaaaataatttattagttaattatggttatacatagggattaatttataagtttataaaaaactcgagtaagaaaataggaggcaagttatgaaaatatttgaagcatgtgtggggaattataatgaggcaattttagctgccgaaagaggagctaatagactagaactttgtgataatttgatggaggggggaacaactccaagttacggaacaataagaaaaattgttgaggatatagatataccagttatggttattataaggccacgcggtggaaatttcacttacacaaaagaagaactagaaataatgaaatacgatgtgaagatgtgcaaagaacttggagttcacggggtggtaattggttctgtaaaagattctaaggtagataaagaaataatagaggagttagttaatttggcaaagcctatgacaataacttttcatatggcatttgacgaagttgaggataaaaagatagccgtagatgaaataattaaattaggaatagatagaatacttactaagggcggatgtgaaaatgctatggctggaaaagagtgtttaaaagatttagttaaatatgcagacggtagaatttcaataatgccaggaaaaggcgttaataaggaaaatagagattttctcttggaatatacaggtgcagttgaaatacatggtactagagtagtttagtattataaataactatacaaaaagcagagtttttttaacaatactgcatttaagtcggaatatttttgtaaatttaatgtattatggcaaaataagtaaacctaaatatatggaaaaagtagtaaaatgatttataatataattgttactaacgattattcatagagttttaaataatatatatgttgcaatgcacaattcacaattatggctaaaattcttgaaatatttttagaattatgatgaagaattatttttgtaacatatataattacactaatactggggggagaattttgctggaaaataaaatactcgatttaattgaaaatgaggataaaagaaagccattaaccgacagtgatattgctaaattagtaaatacgactagagaatatataactcaatttagaacagaaaaaaatataaataattctcgccaaagaaaagaagcaattctatatagtgatataaaagaaataattattgaagataaagatatttcagataggcagttatgcaaaagactatctattcttggatatgatatttctagatattcagtatcgcagattaaaaaaagtataatttcagaagtttttccgcagaatgctgctgaaaaatcaaatttaaataaagatcaaccgaaaaattttataacagttaaatcagtagttgataaagatgggactgaaattaataatagctccaatatagataattcaaataagggcgataaaagtaacactaattatttaagaaatattataggatatcacggctcgttaaaaaatgcaattagtcaagcagaagcagcagtgttatatccacctcatgggctccatactcttttacttggagcttctggtgttggaaaaagtttttttgcagaggctatgtataattttgctattagttcttcgcattttgataagaatgcaccatttgtactttttaactgtgctgattatgtagataatccacaattacttctttctcaattgtttggttacagtaaaggtgcttttactggcgccatcacggataaagttggattagtggagaaagcaaacaatgggatactattcttagatgaagtccatagattaccaagcgaaggtcaggaaatattgttttatctgttggataagggaaagtacagaaggcttggtgaaactgaaaatagtaggacagcaaatgtaatgataattgcagcaacaacagaagatccaaaatcatccttgctactaacattcagaagaagaattccaatgataattgaacttccgtctattaacaacaggcccgttaatgaaaaatatgttttgattaaaagttttttttcacaagaatcagctagagttggaaaggaaattaccatacgatatgaagtcattagatcgttactattatacaattgtccagggaacataggacagctgcgaagtgatatacaagttgcatgtgcaagaggtttttgtaattccttaagtaataattcaaatgaagttgctattgatataaaagatttgcctaagcatgttcctctagaaatattaagtgttaaggatagagaactagtgtcagaagatatttttaatgaagatttggttgttaatcctaatgatgttgtgacacagaaatccaaagatgatagatatatgttacctgatggaatatatagtaatatagaggaaaagtattataaacttgaaaagcaggggttaagtaaagatgaaattaataaaatattgtggagcaaagtggaattcaatttaagtaagtttgcaaaaaatatagaatcaaatatgttttttccaaaggaagaactaaaaaatataatagatgaaaaaatattaaatgtggttgaaaaagtaactgatattgcaaaacaatatatagaaaatatccaggaaaatttttattattgtgtagcaatgcatttgaattcaacttatgaacgactaaaacagggaagaatagtaaggaatcctgaatcagattatataaagaaggaatattacaatgaatacagaattgcaaaaatattaactaaagaaataaataatagcttagatattgaacttccagaagacgaaataggctttattgccatgtacctaaaaacgttttctgaggtggataaaaatgtaagtagagtggctgttattgtattaagccatggacatgttgcttgtggtatggtcgatgtagcaaataaactattaggtacaaatcttgcagttggaattgaaatgtcactagatgaaaatcctcaaactttacttgaaagagctatagaagtggttaaaagagttaatgaaggtaaagggtgcttgatattggttgatatgggatcactggttacatttggggaaataataacaaaagaaacaggaattccaactcgagttattggtagggtagatactgtaatggtattagaagcagttagaagatcattaatggagaatagtaacttatacgaaatttctaaagctcttgatggagacaaggcttacgttgggaaagttaaaggggcgaataaatatactaaaactataattacaatatgtataacaggtgaagggaccgcgttaaaaataaaaaagtatcttgaagatgtagtactaggaaatacaaataagaacttaagaattatatcagttggaattataaataaagataatgctcaaaatgaaataattaaaattagtagagatcatgatatagctgcaatagtcggaactatagatcctgaattagaaagtattccatttatatcttttcaggatattttaaaagaatcaggtaaattaagattaaaagaattccttagaataaataagaaacagtttaatcctttaataaatgtaattgatgaggaattaataaaagttaataatgatagatttaccaaaagtgatttaatagatgagatgtgtagtcttcttatatcaaaaggaagagttagtgagaattttacaatgagtgtgtataagcgagaaatgcttggaggaaccttgtttgaaggaacatttggaatacctcatggcctatcagaattcgttgaaaaatcatctatagctatttttaaacttaataatcctattttatgggattataattgtatggtagacgttgtgattatgttggcacttaaagaaaatgatggaaaagtggttagacaattatttgataccttatcaaagacagaagtagctaataaattaagaaaatcaaattctccaaaagagatttcagacatattattaaaaatctaataactattttaagttacaaggtaaaaagtaaaaattttatcttgtaactttatatttttaaatatatattaccttttcagcatagttttggcacggcgattgctttagaaatattgtgaagatgtaatcaaatataaaacaacatcaagtgaagaagaagtatgattactagaaatattaaagaaattttatacaaaaaaggaggtagtttaatgacttgaagcatttagaaactcttgagaagaaatttagcgttaaataaccttgaagctaaatttaaagttgggtttaaaaatatatattattaccttttcaacatagttttggcatgataattgctttgtaaatattatgaagatgtaatcatggatgaaaacgtataaaatacttacaaaaaaggaggaagttaaatgactagaagtattaaagaatttttaagaagagatttagtagtaaataatcttgaagctagatcagcagaggatgtctttaagaagatgtctccaatattattagaagcaggatttgtagaagattccttttttaatgggttagtaaatagagaaagtaaatttcctacaggtttattacttggaaaatacaatgttgcaataccccatacagatgccatacatgttaagaaaccagcaatagccattgcaacactaaaaaatccagtgaaatttaatagcatggatggaaatggaagtgtagatgttaatatagtatttactatggctttaaatgaacctcatagtcagatagtaatgttacagcaattaatgtttttaatccagaatgaaagcattctcgaaaatatgcttcaagcaaaaaatagcgacgaggtgtatgatatcgtttcaagctttaattgtaattgcgaataattaatgagcaattatttaaattatatgattttattttaaggaggcaaaaaaatggacaaacaaaaattaatattagtagcttgtggtacaggaattgcaacttcaacagttgtatgtaaaaaggtggaagacttgattaaaactaatgggattaatgcgagaattatacaatgcaagatttcagaggtggcaggttatgaagatcaagcagatcttttagtaacaactacaatttcatcacgaaattataaattccctgtaattaatgctatgaactatctaactaacattaatccaggaaaagttgaccaaggaattatagatgctttgaaataaaaaaagataggccactttaaaggtggacctatataaaaaatttaattggattactaattattatagcacataaaattatgtatttgaagcttaggaaaacacatcttaattaatagtattttttgttcaaaaactaaatcatatatacaaatttatgatatgaacacttaattgagaatttataaaagtaaataaaatttgataatatagggggaaagaaaatgttattaaatgtagtgcaatacattttgaacttaggaccaactgttatgctgccattaacaattactatcattggtattatatttggacaaggatttaaaaaagcatttagatcaggtattacaattggtatcggctttgttggtataaatttggttgttggattgcttacaacaaatcttggtggcgcagcacaacaaatggttactagatatggattacagctaagcataatagatgtaggctggccagcagcagctgcaataagctgggcatctcctatagcagcaataatgattccaatagctatgctagtaaatttagtaatgttagctacaaagacaacaaatgtagttgatattgatatatggaattattggcactttactgcagctggtgcaagtgtatacgtattaactaatggtaactggttacttgctattttggctggtatcttatacgaagttgctgttattaaaattgcagataagacagctccaatggttcaagaattctttggacttgagggagtatcattaccaaccggttcaactgcagcttgtggtcttataggaattcctattgttagtgtagtaaaaagaattccaggcataaaaaatttaaaagcagacccagaaactattcaaaaaagattcggcgtttttggagaacctatgatgatgggacttattcttggtattgtacttggaattcttgctggctatggtgtagataaaatcttgcaaataggtatttcaatggctggtgtcatgttcttaatgcctagaatggttagaatacttatggaaggtttaattcctgtttcagaatcagttagagaattcttgcaaaagaaaaattttgggaaagatagaaatcttacaattggtttggatgcagcagtagctgttggacatccagcagttattgcaacagcacttgtattagttcctattacattattcttagcagtaatattacctggaaatcaagttttaccttttggagatttagctacaatatgtttttatgttgcctttatagttggtgcagcaaaaggtaatatagttcactcagttatatcaggtacaattgttatggcattaggattactaatggcaacaaatatttcgggattccatactcaaatggctcaaatggctcaatttacaatgccggcaggaacatcaactatttcaagtttagatatgggaggaaatttcttaaactggatagtaattaagatattccaattattcacaggaagtctataaagtgaaacttagcttcagagggagttttaaccttcactgaaggttagttgaagttataccctcaaggggtacccagtctagggtcgtgccactgttatctctcactttaatagaagatgggagtgttacagtggctagacatcagataagattaaataacctaatttgttaaagagtgcttattagtactctttaataccattggctatttacaaggaaaggatgatggttatagtggaagtaacaaatttaaaagtagaagaacttattggaatggattttaagtgtgaatgtggaaaaaggcacagtgtagaaattaattctgtaaaaataggaagtaatataatagaacggcttccagaattcctaaaagagtttaggaataaaaaaatattaattatacaggatgtccacacatatgatatagcaggaaaaagagttgaagaaacattaaataatgattttttattaaagaaatatgtgtttccacaggaacacttattgcctgatgtatatgctcttggaagagttttaatagaaatagaagatgatacagaacttatacttggtgtaggctcaggcgttataaatgacatttgcaggtatgtcgcttacagagcacatgtgccttatgccatagtatgtactgcaccatctatggatggatatgcatctgtagtatcgcctttaattacagatggattcaaagaatctcataaagcagcctatgcttatggaatatatgcggatattgacattatgaagaatgctccaatgtatttactttgttcaggacttggggacgtattaggtaaatatactgctctcgcagactggtcaattacaaacctcttaacaggggagtattattgtaagactattgcggatatggttcaatctacagtaaataagtgtgttgctgctgcaccaaggattccagaaagggatgatgaagtagtaaaaaatataacagatgcgctagtattgtcgggaataactataggaatgtcaggttcttcaagacctgcatcaggttctgagcatcatattgctcatggatgggaaataatgtttcatacaagaaatagtgaagaaaaatgggtacatggaaattttgttggagtaggtacagttgtaatggctatgttatttgaagcattaaaggatatagatatagaaagtgttatggctaagaaaagcttcagatactacgatatgaataaatggagacaaaatattgaaagcgtatttggtaaagttgcagttaatgtaattaattataaaaaggatgcaattgaattggatcctgataagagacaagaaaatgcagaaaagatagcagcaaactggaaagaaattcttgatattggacatactatagttccaagttctgagaaagtaaagaaaatactacaggacggtggatgtgtatggcatcctgaagagcttggaatagataagaatttatttattaagacttttattgctgcaaaggacataagaacaagatatggcgttgtgcatttaatcgataatcttggattaacagatgaaattgctaatttaattgctgataaattgtataaggcacaatcaaaaaaataacaaattcatctgccaagcctattttccatcatgcttcttcagcagattacctaatagacttgctatgagaccaatctacttccttgcctgatgaaaaataatcatggcattttggacttgttattttctttcatgtgcctaaatccaacaacatataagacaattatgcgttttaatatggaggtaaaaatgaatgagttaaaagatattaaatgttttttattagatatggacgggactttctatcttggaaatacaattattgatggagctctagactttctagacattttaaaaagtcaacaaaagaaatttatattcttaacaaataactcttcgaaaaataaatcaacttataagcaaaaactttcagcacttggctgttatgttgatgaagaacagatttacacatctggtgaagcaaccatatggtatatgaagaaaaactgcataggtaacaagatatatctcatgggtacagaaccacttatggcagaatttgaaaaggctggctttatactagttaaggacaaaaatgacaaaccggattatgtagttcttgggtttgacactacactaacttatgaaaaaatatggacagcttgtgattatataagagatggagtaccatttatagctactcatccagatttcaattgtccaattgaaaatagcaaatatatgcccgatactggctctatgataagaatgtttgaatcatccacaggtatttctcctgtggttatagggaagccatatggatatatagtagaggctattattgaaaagtatgggcttaaaaaagaagaagtggcaattgtaggagatagactttacactgacattaaaactggagtgaatgcaggaataactagcgttcttgtattaagtggtgagacatcagaagctatgtacagagaatctgacataactgcagattatgtattctcatcaattaaatatattggtgaagagctgatgcagttttatgaaagctttatttaagaccttgatgattagaagaattttatctagtcattgtatgttaaaaaagtattgaaaattcatggaaagtaattgtattctatgagttttgaaaaattaaaaagaagttaatattcaaaattaggaggcaatattatgagcattataacaattattggagcaggtcaaatggcatctgcactaacttttccagcaaccgaaaataataataagataagacttgtgggtacaccattagatagagaaatcataaatacagcaaaggctacaggttttcattccacattaaaacgccaattacctgaaacaggaattgaatactatcaaattgaagatgtaaatgaagcaatagatggagcagagcttattatttgcggagtcagcagcttcggggtggactggtttgcagacaatatattacctattatacctgaagagattcctattctttcaataacaaaaggaatgattactgaagaggatggcaaaatgataaattatcctcactactttttaagtaagcttccgtctaataagaagctttctattagcgctgtaggtggaccatgtactagttatgaacttgccgataaagataattctgaagttgtattttgtggagatgacataaatttacttagaaagtttaagagtttatttgaaacatcatactaccatattagcttatctacagatattgtaggcgttgaatgtgcagtagctctaaagaatgcttatgctttaggagtttcactagctattggattagccattggagctgatggttccggaaaagagcactataattctcaggccgcactttttggacaaagcataaaggaagccaaacgtattcttgaaatagtcggtggaggagaagaaaacattatatattttggcggcgacttatatgtaactgtatttggtggacgtactcgtagaataggaaccttattaggccaaggattttcatttgaggaagctatggaacaattaaaaggagttacattagaatcagtagttattgctacccgtgctgcaaaatacgtgcgttgtctagctgaaagaggagtagttaaacttagtgattttccaatgataactcatattgatgagattataaatttaggcggaaaggttaatattccatggaaagcttttgaatctgaaaaaatattataatttatcattaacaagctgaaaatttggaatgtaaagtttaataactttaattaaaattctaaagttaaattaccatgattagaaaatgagtatgtagtaaatattattgatatcatattttgagtacagtactagatttaaatttagtgctgtactttttataagcttcttcaacaatatatgatataatatttaaaggataagttgaccattttcctatttttataaaattgttattccagttaaagagagttagtgttataattacataagaaaattgtgtaaaaaagtgaattaatatacatgtatgtatattaatttctttttgtttactatatttcatagtaactcataaaattttatttcgttaaaatcaaaatgccatttaatttaagataagtttctatgttaataacactaatacatatttgatattattaatacataaagtttttttaattagtaaagtagttaggaatcttattttaatgagtatatattgagttactgattttctttttcagggggtagcaatatatgtttcaacgcgaatgcgatcaagaagcaagttatattatagaatcaaaaaagaaatgtcttgagttagggttggactcaaataatcctaaaatgcctaagaatattatgtctgaattggaattaggacaaaaaagagatgcctatgacgaaattctagaagttgtcaaattttttagtaataagatgataaaattattagaaggcacgcctgtattgataacaattacagatgaagatggatatttgctagatgttcttggagataaatctattagtgaaacaatgtctcaatttggagttaagccgggtatacaatttcgagaagaggaaatgggtacaaatgtagttagtttaacacttaagcaaaaccatccaatacaactaataggaagcaatcactatcataaatgctttcaagacagtgcatgttatggagttccatttcattattcagatgatggtaatttattaggaagtatatgtattatgactgcgattatacttcataatccattttttttaatgacattaactactgtagttgatgcaatagagcgtgaactattgctaagaaagcaaaatctaaagataaccgaacaaaaagaattattatatgaatcagaaaagagacaaagagagtttcttgaaaaagatttagcaatgaaggatgaatttataactttaatcacacatgaatttaaaacgccaataaatgttatttattcagctatacaattgattgaacatgtgtatattagtgaaattcctgaatcagtgaataaacttattggaagcataaaacgcaatacatttagacaattgagacttgtgaataatttgttagatattacaaaattaaaatcggatcagtttaaattaaatttgaaatatttggatattgtgtttttaacaagattaattacagaatcaataaaagtttatgcggatcaaaagagaattaacctttattttaaaactaatgttaataataaaaatatttcaatagatgatgaaaaatacgaacgtataatcttaaatttattatcaaacgctataaaatttacacctgaaggaggctcaataactgttgagcttaaagaaaatagcaatgataaaacagtagatatatctgtaactgacactggagttggtataccaaaagagaaacataaggtaatattccatagatttggacaagttgaaaataatctttcgaggttagcagaaggtagtggtattggattagctcttgtaaagatgttagtaattatattagaaggagaaatagaagttgagagtgaagtcggatgtggaagtaagtttactataactttacctattaaagaggagatagttaatgaagaaagtaaaatatcacaaagatatgataacaggttaataaatgccattaatgttgaattttctgatatatatttctaataatatttagatagtatttcatttttgatcatgaatataaaaattagaaaaggtataaactaaaaaatgaggtgagaaaaaatgacaaactataaatttattacaaataataatgaaaatgattcgtcaaataccacaaatacatctatgccagcaaaaaataggaaaagacataaacctgtaagaggaattcctagaactgaaatgtaataaatggcaactataagtttgtagaatgaaaaaagtgcggtactaaaaatatgttttggtactgcactttttaagtttatataattataacctaattactttaaattaagaatattttttatattaaaacacatgataaatttaaatactataactcggcgaaaaaaatggaggatctataatgagcatcttaaaaaaaataataacatttataattttagttttattaataattacatcattagatacttcaacaaaaaatgtatgtgctatccccaatttaagtaaaaacacccctattaaaatagcagtattttcggataactctagcgctatgtatatttctcttcttaaagaaaatttagaacgtattgaaaaagaaaatgaagacaaagtcaagtttacgttttttgatgctaaagacaatcaggctaaacaaaatgaaagcatagagaaagctctttcgcaagactttgatctttttattataagtataatctctcccaatttaaaagatgtagaaagtactttgcgcaaaataatggaaaaagatattcctataattttgaatcctgatccagtacaagaaataataaactttgttaaaccatataaacgttttgttgttgtcggtgctgattttgaacaatcaggtactatggaagggagtattcttgttaatgaatggagatccaataagcagataatagataaaaatcacgatgatgcattgcagtatattatgctaaaaggtagaatcggaagccctctaacatcgctaaggacaaaatactcaattttagcgcttaatgatgctggaataaaaacagaggaacttgcttctccatcatgtgaatggatggaagattgtgcccaaagtgctgtggagtcattatttcttaaatatggtgacaaaattgaagcaatagtttcaaataatgatgcgatggcaataggagcggttgaagctttgcagaaatatggatacaacaaaggcggtaaatctaaaacaattccagttgtaggtattgacggcatgccaactgctaaagatttgataaaaaaaggttttatgtcgggaactgttgttgtagaacctagcgatcttgctgaagctctttattctatcggtatgaatttggcttatggtaaatcaccccttgaaaacactaaatataaatttgatgaaactggatttagagttcatttaaagtataatgaattcataaagtagttgaagtaatgagagtttaattagcattaaaataattaataatgcgaagtgctgtgtgaaatctaaacaattcaagatttttgcattttaaatggaattaatattatttaaatttagaattggtaaaatatttttataaaagaagtgcttatagaattagctgccttggtatattgtgatttaaatttaggaaattaaaattaaatttttattttaatagaagaatttaatgaataattatcatattctaatatataataaacaatctagataagaaaaaggggtgcagctaaattgacaaaaatatatgatgttgtattaaatgctccatttggtagtcagcagggcagaattacttttgtaataaatggtgaatctttaacaggagcaattgatggaatgggatttaaaagcaaattcaataacggaagaattcatggaaacaattttgaattttctggagaaataaaaattctattggccaagttaaaatattctgctaaaggtattttaaatggtaatctattgtcagcatctgttgatacaaaatatggaacattctctgtaacaggaagtcttatatctcaatcttaatgtcaatttaaacaagataaatataagagataataaaaatatttgaaatgcaaaatgatgaaaaatacgtttagataatataaatctttgttagacagtaaatttattaaattagatttactgtctatattaattattaggataattagtagaagttgaacttatattgaataaatagtattcggcaattatttgaaaagtgaaaagtattattgctgtgattatttacaagagtataataattggacataagcagataataaaaagggctgtaattatgtaaatatgatagaaattaagaaaaatacttttggttatatatcgtttttaattataaaataaaagaaataaaatacaaatagataattgcgaaactcattgataaaaatgaataatgattgatttgaagttgcaaaaacattattaatggatttaatggttcctgctatacaaatataatagttgacttcttaaaaaagggcgcacgaaataaagcgaaggtgaattccaatttttataaataaattttatgcaattaatggctttaagcttcggatatatttatgtttatgaattttatctgccacgataactgttattagttgagttattccggctagaagtaaatcagcatgaagtgtttgctcattttgagtcttacgctccgcgacgcagtaactatatttgaagtgatttatatttttttcaacagctactctgattttataagtattactccattcttgggttcctcgtgttattccaggatatgcgcgcagattcttttcaggataaatataaaacattcgtccacataaggaatttgtacatggattttcacattgagttacacgtttgctctttttggtttctttgttatataaccatttcattttagggcatacaaacttcattgttggaattctagaacgaagatgacttttactaccttcacgtttcattggaatagaaggatcattcggacagcatggaatgccgtcttcgtttaaagggcaatcagcattttctagtgtaagcctagtttttaaaggaatatatgctttatcaaattttaattcgagaagaagatcacgataaatttgaatactgtcaaaagcagcatctcctaaaaaggtttttggacttattaatggatgcttgttaaaaaaatctttgagaacagggataagagccttagaatctgcaagagatttatcttcatcaggtgaatcagattttttctcaacaataatatcaggatgagcattgagaaaatctttattatagaacgaaatatctcttacgataccgaggccattagtaatgattccgaatttaaaagcatagcaaaaatgcccattaatatacatttgttggatggcagggttggctgaagcgtgtgatggcatagagccataggcagctttataaggatcataagagtcatctaaattgcatgctttcttaaaatttttaagctgttttataatgcgattagcatatttaggattattttcagtgacaaatgcttcaaggcctgaagtatcaaaaatagtcatggaagcaagagccgtatcaatctgttggcatatcggttcagtaatatcaacaagattatcgaacatggattgtaagtccaaaagaaagtcctgcttgaaacgagtaaacttagatgaatcaggaactcttaaaaagccgcagaagtctcttagttcttgagaatatttaaggaaaataattaaaagagaatctgtaggaatagaaaaaatgcgttgtaaaattaaagcactgatcatagcataaagctgatattttcgcggccttcctgtggaagcgtaaaaatggttaatgaaagatgcaggaactaactcatcaaggtcgatagtgttttcgagtaaagaaagaaattggaatttatcattttcaaatttttctttgcaatcagaataaacatctgccaaagaaagctgtttatatgttatcatatatatgactcctttctgaggtatatggtagttttgtttttaggcaattcaattttaccataaatcagtgaggagttattttattttgctaaaaaaatatcccgcatttctgcgggttgcggcgtttcgcaaacgcctaataaaatacaaaagaagaaaggagagatataatgcaagatataaaaataaaatcagaaactggatggaaattagataatacttatgctgatttgccaaaaacactttttagcaagcaaaatccaacacctgtaaaggcgcctaaattagttgttcttaatcagccgcttgcagaatcattagggctgaaggcagaatttcttcacgatagtgacaatgtagcaatctttgctggaaataaaatagaagaaggcagtttacctattgcacaagcttatgcaggacatcaatttggctattttaatatgttaggtgatggcagagctatattacttggtgaacaaattacgccaagtggtgaaaaaattgatattcagctaaagggatcaggcagaacaccgtactctagaggtggtgatggaagagcagcgcttggaccaatgttgcgtgaatatattattagtgaagcaatgcaaggtcttgaaattccaacaactcggagtctagcagtagtgacaactggagaacctgtaattagagaaaacgtgctctcaggtgctattctaactcgggtagcttcaagccatattagagttgctacctttcagtatgctgcaaagtggggaactatagaggagctcaaagctctagctgattatactattaaacgtcatttttctgatattgataacttagagaatccttatatttttttactccaagaagttattaaacggcaagcttcattgatatcaaaatggcaattagtaggttttattcatggagttatgaatactgacaacatggctattagtggagaaactatagattatggaccttgtgcctttatggatacatatgatctggaaacagtatttagttctattgatagagaaggaagatattcatatggaaatcaaccacctatagctgaatggaatttagctagatttgctgaaactttgttgccattacttcataacaatcatgaaaaatcagtagaaattgcacaaaatgaactttcaaagtttgcggatttatatcacgataattggcttagaggaatgatatcaaaactcggaatattcaataaagaatcacaagatgaagctcttattgaaaatttgctaagtattatgtataaatataaggcagattatactaatacatttagtgctttaactttagataagtattctgatatggagttatttaagtctaaagaatttgataaatggcatgaattatggaatgcaagattaaatagacagaaggaatctaaagagtcttcaaatatgttgatgaaaaattcaaatccttatgtgataccacgtaattatagagttgaggaagcattggcggctgctgaagaaggcgattatactgttatgaataaactattacatgttttatgtaatccttatgcatattcagataatcaatctgaatatgaaaaattgcctcaaaaatcttgcggctcgtatcgaacttattgtggaacctaattttaaataataatattaataaatttttaataaaataaaaaatacctaaaaaagggcgagacataatatagcccttttttcattttgtgaaatatacataaatcattgggcttatgtatttaagataataaaaatattagaattattatgtaaaactaaaactaattttaataaaaaatcatataaaaaatttaaaaagtaataaaaaagacataaaatttatacgtttacacttaacaactaatgaaatttatggtataataaaaaacgtattctggaaattgaaaaggagagatttgatgtcaaaaagttatcaatggataaaagttgcaaaaaaatcaatcgttttttctgtagctttgagtatttatttaggtattggaactgctttttcagctaatttagttaaagcagctacaacacaaaataaagatataatctgctcaacaacagcgtacacagcggagtcaggaagtgtgacagcaagtggaaaaatagcaaagagaaatgcaagtgggataagtacagtagcagtggatccaagcgtaattccttttggaacatatttatatatagaaggttatggatatgcaatagctgcagatagtggaagtgctataaaaggcaattctattgatgtttattttgatagcgatagtgaatgtgataattggggtaggaaaactgttaaggttacggtatttggaaaatccgacaattaaagagaaatgaaaatgtttaactaatctaaataagtgttaaaataattgataatcgtaattctaataattaaatccaggaagcaattaattcagattgagttagacaagcttgtttagagatcagtgatacttaaatttataaagagaatattcaattattataatatctaaaaggaagtgtttctaaatatagggacactttttttttattgtctaggaaagtatagaattttttgattttgagagccagtgatatcaatggttataaggatattgacctgtaaaaaatggtataaagaaagagcgtggcgcagccacttttgttctttgaaaagaggaaaattaatatagtgttattgataaaatatcaataatatatcaattattttgaaggtctatcaataaaatattctttataaaaataaaaaataaaaataatgcactatatattaactaattaataatatggagtaataagattgacaaactagtaaatagttgttagtataaaagtattcctacaagaattgtatgaattaaaaaaagaattaaaaggtgataattaaatgaatattgactggaatttcgtagtgactaatttgcctttatatgagaaagctgcatggcttacattaaagttagctattgtagggatacttttatcattggtaataggattactatgcggaataatattatactttaaagtaagagttttggataaaattgtacaagcttacattgagctttcgagaaatactccactactcgtacagatattttttctgtattttggtttgcctaaattaggatttaaaatgggtgaagctacttgtgctataattggtttagcatttcttggtggtagctatatggctgaagcttttagaagcggagttgaagctgtaagcaaaacacaaattgaatctggcataagcattggtctttcaaagggccaacttattagatatgtcataattccacaagctttttcagtaagtatgccttcaataagtgcaaattgcatatttttattgaaagaaacttctgtgcttggagctatatcaataatggatctcacaaatttaacaaaggatttaataggaatgtactatagaacttttgaatcattatcattgctagttttgatttatcttatcatgattctacctttatcatttctaatgtcttggatagaaaggaaggttcgatatgcagaattcggcaattagtgttatttttcaagaaaacaatattaagcgtttatttgaaggactgtttgtaacagcagaaattgcttttatatctattattataggatctatactaggaatacttataggtttgagtaggactacaaaatcgaaggcgatactttttattaacagagtttatctagaagcttttagaataataccaacgttggtttggttatttgtattctactttggagttactacagcattaaatataaaccttagtggagaagttgtttctgttattgtattcagtctttggggtgcagcagaaatgggagatatagtaagaggatctcttcaatcattaccaaaacatcagattgaatctgggaaggctttaggtttaaattattatcaaatatatagatatgtgcttatgcctcaagctatcagaagaatgatacctggaaccatcaatttagcaactagaatgattaaaactacttctcttgtagttttaataggtgttatagatgtagttaagatgggtcagcagattattgaaagttcaagatttcaatttcctactgcttctttctggatttatggttttatattcttcttgtactttataatatgttatccactatcaaaaatatcgaaaagactagaatcaaagtggaataattaggaggaacatacatggataagaataataatcctgtcttgcttgaaatacaggatgttcacaaaaaatacgatgaaaaagaaatattgaaaggtattgacttaagtcttcataaaggagaagtattagttattttaggaccttcaggctgtgggaaaagtacttttttgagatgtctcaatggactagaaaaaattcaaggtggagatattaaatttaaggaacaaagttttacagataaaaatgccgattggcaaaagattcacgagaaaataggaatggtttttcaaaactatgaattatttcctcatatgacggttattgaaaacatacttttaggtcctttaaaggttcagaagagagataaatctgaggcacttgcgcaagcagaacaacttttaaataaggttggattacttgacaggaaagattcatatccacgtcaactttcagggggccaaaagcaaagaatagctatagttagggcattatgtatgaatccagagataatactttttgatgaagtaacagcatctcttgatccagaaatggtaagggaggtactagatgttatattaggcttagctaagcaaggcatgactatggtaattgtgacacatgaaatgggatttgctcaatcggtggcagataggataatatttatggatgagggtaaaatatgtgaagaatcgaatccaaacgaattctttactaatccaaagacagaacgtgctaagcactttctaaatatatttcaattttaattattaataaggggatgacaaatatgaaaagcataaaaaaaatagtggcagctttactgttaagtacagtagtagttggaagttttgttggctgtggtaattcggcacaaactaataatggtgattccaataaagcatcatctagttctttagaagatataaagaaacgtggaactataaagattggtgtatttagtgataaagctccatttggatatgttgactcagaaggaaaaaaccaaggatttgatgtatatgttgcaaaaagatttgctaaagatttacttggagatgagtcaaaagttgaatttgttttagttgatgcagcaagtagagtttcttatttagaatctaaaaaagttgatataattatggctaattttactgttacggatgagagaaaagaaaaagttgattttgcaaatccttatatgaaagtatcacttggtgtagtttcaccagatggcgctaaaattacttcagaagatcaacttaaaggcaagaaggttattgtagcgaagggaacaactgctgaaacttatatgactaaaaatcatccagacgttgaacttgtaaaatatgaacaatattcagaaatattccaagcattaaaagataaacgtggtgacgctattttaagtgataacacagaagttattgcctgggctaaagataatcctggattctctgttggtataccatcacttggaagtacagataccattgctccagctgttactaaaggtaatacagaacttagagattggattaatactgaacttgaaagtttagggaaagagaactttgtgcacaaagcttatgatgaaacattaaaatcagtatatggtgctgaatttgaagatagccttgtagttgaaggtggaaaaatacaataagattttttaaaggatgaggatacaatacaatcttcatcctttatttttatatactcgaattatacactgtaatcaatgtttaagaagtattatgcttagctagtattttaaagcacttaattaaagttttataagaaagttatggtttgtaaagagaataaaaaagaagatatattcgcctgcgattttgttctcgttttgatgatcggaatatgcgagtacgaagtttgcattcatcagcattaaatcgattaatatcgatattttttaagtagtcaaatgtgtaagattatgctaatatttaaatatgaatacctatttgggaaagttttttcttttaagtctagttaataaaaatccaaatagattttagtatgaatttgctttctttagaagttgtgttgtaagcaaacttatatttaattatttcattcggaggtgtatatgagagttgttagtgtttccagcctaaagggagatgaaatactaggaaaacagatttttgatgaatctggtagaattttacttagcgttggagtgaggctgaaaccttattatatcgaaaaaattaaagaacttggtatttattcggtatatattgatgatgatatatcaaaaaatcttgatattgaagaaagtatttctgataagacacggcaaatgagcaaacatgcagtaaaaaaaatgatagacggatattgccgtgaaggaaaaactgataataacagcgttatgaattctgtaaactcagttattgaagatatactatcaaataaagatgttttaataaatgttgcagaaataagtgctagtgataataatatatattctcattctgtaaatgtatgcgtattagctacaataatagggactcatatgggatacagcatgtctaaattgaaagatatagctgcaggtgcacttttgcatgatattggcaaaataagaattatgaacgataaaaaaatttcgtctgaatttaaagataaaaatgaattcaatagatatatggaattaatgcatcctaagatcgggtatgattttctaggggatcagcatgtttggaatgcatatgttaaagtggctgttttaatgcatcatgaaagaaatgatggaagtggatatcctttgcagctaaaaggagacgaaataaatgagttggcaaaaattgtatcgatttgtgatacgtttgacaatatgatatccggcagagaagaaaatgaacggaaaactgtgtatgaagcaattgaatatctaataggtatgagtaacatttattttgatgaagaaatagtgagaaaatttactatgaatatagcagcttttcctacaggaagcggtgttattctgaattcaaatgaaaaagggttagttgtaaaacaaaacaactcaatgccaatgcgccctgtagtaaaggtgttgtatgatgaaacaggaaatttactatctgaaccttatgaagtcgatctactgaaagaattaacactttttattacaaagactagtgaaatttaattttaggaggataacatgaagaatcaaaacaaggatgaaataaatatttattctaatgatttcctaaaattaatgaatagtattcatgtgagatttttagaggtgaattctataaactataatgagttattaagaagatcattagaggaaattggagaattttttgatttagatagaatatatatatatcatttttctaaagacccaacttttatgaaaatagaatgtcaatggaataaaaagtttataaaacccaaaagagaaattatagaggatgaagtagtttacgcttttccatggctaattcgtcaaattaaaagtaaagattttattgctttaaataatataactgaatttccgtttgatgcaacatttgaattagaagcttttaatatggagggaataaaatcgtctcttatacttccattaaaagataaaaacaaattaataggttttataggatttgaaaccttatcggaatcaataatatggcaatcggaacagataaaaatattaaataatatttcaaagtttttagaattcataaaagctaggattacaaaattaaaagaatacgaatcacttcttaatggtcagactattttacttgataatgcagcatcacagatttgggcactaagcaatgttacttcatatgctactgttaatgaggctcatgcagaattttttggtaagaaaaagagcgatttagaatataaagacctatatgacatatttgatattaatactgcaaataagttgtctgaaaataattgggaattatttaggaatgatgaaccagcagagaaagagatcaaaattaagaattggaaaggcgaggacaggctccttcaggttaaaagtaaacctattaaagatgaatcaggtaacattaaatatcttgtttgtacagcacaggatattacggaacaaagaattgcagaagctgaattatataaagcaaaagtagaggctgaatctgcaaatatagcaaagagtcagtttcttgcaaatatgtcacatgaaataagaactccaatgaatggaatatttggatttttagaattattggaatcgtcaaatctctcattggaacaaagagaatttgtacgcgaagcaaaatctgcttcagatattttattaaatattattaatgatatattggacttttcaaaaattgaggctaaaaaattagtactagaaaacataagttttaatttgagaactgttatagaagatgccgtttcactttttgttcctaaaaccttggaaaaaggaattcagctttatacaataattgatccaactattccagatgaggttataggtgatccgtctagacttaagcaaatattaaataatcttttgagcaatggtgttaaatttactgatgcgggtgaaattgcaattaaggttgattattttgaggaagaaaatgagatcgcacttcttacatttgaagtgagggatactggaattggaattagcggaaaggatatacaaaaactttttaaatcttttaaccaagcagatgcatctacaacgagaaaatatggaggaactggacttggactttctatatgccgagaactggttaatatgatggatggtgaaataactgttgatagtgtattggataaaggatctacttttagattttgtgtaagattaaaaatatctaaaagggcttctgaacatatctctattttcgaaaaggttaatgacgtgaatattttgattgttgacaatgatgaaaatagtagaaagattacaagttcttacctgaaaggaactggattacatataattgaggttgatggtgctggtgaagcaatttcaacaattatttctaataatgatacaaaaaataaaataagtattgtaatcattgagtgcgagataccaggaatgaattgttatgaacttgcacgaacgttaaaaaatataccaatagccaaaaatatcaagttaatactgttaatgtcgaggtataaaggagactttaaggcagcaatggagtatggcttttcgtcttatttgaccaagccactaaaaagagatgatttacttgactgtattgctgtaaatttaggcttgaagaaagaagatgaagaacattttgaagactcgaataaaaatgtagttaaaaacatttataatttatcagaaattagaattttactggcagaagataatgaagttaacagaaaaatttttataagcatgcttaaatctcgtggtattacttgcgatgtggcattagatggtaaagaggcattaagaaaagtatcggaagaagattatgatattgtattcatggattgtcagatgccagtaatggatggatatgaagctactgctgaaataagaagaattgaagaaaatagaaagcacacaaagattgttgcagtaactgctaatgcaatggaaggtgattcggaaaagtgtattaaatctggaatggataattacattactaaacctattaattttggtattgtatttaagatgattgaagaaagtattataaataaaaaacataatactatagactattcaagaataatagataactatattaatgaattttctagagataccggtcttgacatagaagatgcattagaaatatttgaagactacataaggtgtttacctgatttgttaaatggaattaatgatgccattaatactaaggacttaaagaaactagcaaagtttgctcatgagttaaaaggttcatctggaacactaagaataaattctgttcacgaattagctaaaatgcttgataaaaaagctttagaagaaaagttagatgaatgtaatgagatttttggacaaataaaagatttgttttataaaatataatttaataatagcagtcaaattctgaaaaatgaggatgaaggagtttttaatatgaagaagattttgatagttgatgattcatcgtatatgcgaatgtttatacgaaaaattattcaaaaaaggggaacttatatgatcttagaagcatcaggtaaagatgatgcaatagaaacatataagattgaaagtcctgatattataattttagatttaaatatgtctgaagttagaaaagatggcattgatgttttaagccaaataatgagtattgatcctgaagcagtagtaattattatatctgcagtaggatatgatgatgtcaaagatgaatgcttagccttaggagctaagagttatataaagaagccatttgatactcaaactttaataaaaacactagaagaatacaaataaaattttaatacaaaaatagaaaaatcgttatttatactgaaaagatatatatgattagtagattagttgagattaaagaatgcagttattgatagaaaatgtattctttaattttttattaataaggaataaatttaggtgtttataaacaacctaacattatataattaaataattctaaaaagtgaattgggaatcttattttattataatcaatagaatatgtgttgtaataataaatgtacatttaaagatatggtaagctaagtatttaactaatattagcatatagaaaatcgattgcaatatactattataaatagctataaattaatttattaaaagtaaatatattctatgaaatgacaatgaataaatgttattttaaaattaaagtaagaatttatttgatattattggaggatgatgtgatgttagatattataatttacatagcaataggggccgcagcaggtattttaagtggtttgtttggaattggtggtggaataattataattcctgcattgatgtatttaaaaggattttcgcagctcacagctcaggggacatctcttgttgcaatgcttccacctgttggcttacttgcattcatggaatattataagaaaggtaatacaaatataactgctggtataattatttgtgttactatgctaattagtgcaaaatttggaggccagcttgctaatattcttccagcaagtataatgaaaaaagcttttggaatatttattattttggttggaataaaaacttttataggtaaataatgaaaaatagttaattagtaaaaaataatagtctatattattaaaataaccattaatttattataagttagtggttattttttatatgttaataatttaattgctgtattttcaattataaatagtctaaaaacatagtgcttaacttaagcaaaatattaacgattgatcaggtatctctgcatattggtgcagttttgatatattagatgataaattaagaaaaataaaaaagccccaattgggggtgctttaattaaacaaaatgagtgaaaatacaatggatgtgataaatatttaaatgaatgtggtttggaatatataccatcatatagtcactcaaagctatagatcgaattaaatttatttaagtgtatgcctttcaacaatttaaataccatctaactaaagagctatttttctagtatcttgattatctattgcagaaataagagttattctttcgtgtgaaatcaagatatcagtgctttcaacgctaggtttttttactgttactacaagatttcttgggccacctactgcctctatagctctatttataagtttaatagtataagaaaatacttcttttacatcttcatttgatgaaaatacaactgcatgtccagctttaagcattagaatgctgtttctaattattgtttcgataggattagatgcttcaacaataacgccatttacagtataagaattatcaccgttaattatagagaacctagattcaagatagttatcatttaaacatttatctaatgcattagtattattgtaaagaatattactgtaggagctagcaccattctctttacaagtcattaagctaacttcttctaagtgcaattctaattctttaattactgaatctactatttcattctttttttgttcactgtattgcttatatttttcacaagcaacatgagctaatttaatggcatcctccatggtgtcaaaaactccacaatctccttgtctatcgattataactgcatattgaattggtttttttactatcatagtatttatcccccttatatttatagattttaattttttactatgatttctactaacatagaagtagaagaagttaaataattaacgttaattatttaacaataagatttaaaaaaatatagatatttatattactatcttattaagtattataacaatatgttactaattattcaagtggttgttgtgaattttctgaattttattttatattgttaaaaaactagctaattataagttcaatttgaagaatatgtataaattatcataataaaaaataattatttaacaatcttaaaagtatatatagatacataatatagtttgtttttttatagatatttatttatataacataagtaatcaatatttctactaagtaataattgacaaaaacatcaaacaatatacaattatcttattaggatatagggggaattataaatgaaaaaaatagttagtagattaatatttggtttcgtattattttcaataattggatatagcggcattccagagaaggtgaaaaatgaatatattaatagtaataagtatgcaggaatacatataaaagaaataaaagagatatcagttctaaataattcaggagaagaaataggaaaaagaggagaagttacatataatcctgataaaataacagatgaagctttgataaatttttataatgataagattaagaacactgggtataactattatactttaataaatgaaaaagataaaactcagggtattgtttcaattgcatgtgtaaatgtattaacatattcagaaatagatgacaatggatatatagtaaaagcaaataaaaattttgaagtcaaataggattatataaattataacttttgacttcatatataagttaattaaaagaaggcactaaaatgatctctaagactattttaatgccttcttttaattgattttttaaggtgaaattttagctttaaacttgaaatttcttctcagctttgtcgtaatcttttaataaatgattcttccttttaaatatgaagtaatatggaacttcataagctaacatgaatatccatcctatgaggcttgcataggccatacttatcatccctacatgagaaactaatataaaaacgaatattactctaaaggatatttggataagtgtagagattaatgtaattttcatgtttcccatgcctctgaagaaaccttgaataccatttgtaaatgcaggaaataaataaaaaaatgccataagtcctaagtaactcacacctaagtcaaccatgttattatcattagaagagacaaataatttcattatgggtgtcttaaaaattaatacaaccaagcagattattatccaatagcaaaactctatgaataagccaactctaaatccagctttaatacgatttttattatttgcaccacgattttgagcaacaaaagtcatcattccatgagatatactttgttgtggagtgaaagcaaaatcatcaactctgtttacagcattaaatgctgctattgtagctacccctaatggattgatagcaccttgaattaacaatttgccgattggctgacaagattgctgcaaagctgttattgatccatgctggagagtttgttttaaaagcgttttatctaattttatatcctttttagatagtcttaacaatggtacttttttatatatgtaaattatacaaaatagagcggagcaagcttcagcgatagttgtggctagtccagctccaagtactcccatattaaagcctcctataaaaataaagtcaagacatccatttaaaatagatgctatagctaaaaatcttattggtgtttttgaatccccaacacttctcattgctgcagatactgcattatatagatatgtaaaaggcattgcggcaaatattattcttagatagagtgttgcagattcgagaatttcatttggaactccaaggaggattaatatattcttagagaggattaagcctaatattacaattattagagaaaaaaaacatccgaatattaaagttgtcgaaatctctttttttaattcttcatatttcccagctccaaaaaattcactcataagaactgatgctccaatacatatacctgttattcctaaaattacaatattcattacaggattagccgttccaacagctgccaaagcatctgtaccagaaaatcttcctactatgatcgaatctacggcattataagtaagttggagcagatttccgagtattaatggaatagaaaagcttataagatgcttatgtatattccctttagtcatatctttagtcataattttcacttccttaatatttcttcattaggttattatactaaaggttagattacgtcttcaacaaactaattagagaaaatgtttcattttgaaatcattttaactttctccataatgtactatgactaattttcaatcttttctcaactttgacctgattcattccttcttcctccattacatgctttataatacgagtttctatttcttttaagcttccatttaaattaatagggattagagaagcatttttgtgattttcaaattctacttttaaggctgtttttacttcatcaacattaatataagagccattacatttaagtgctaattggtttacaactctcataaattgtcgtatattttcaggccaagtgtattcagatagtaattttataccaccttcttttatacctacaacctgacttgcacatcttaaatctagttttgaaagatacatacttaccatattgctgatttcattactgtaattttttaaaggatttaattcgattctaacttcatcaattattgaacggagctgtctaattaaacttccgttactaacacagaattcaacagggaattcgcaagatgtaattattttaatagtattgtttctagataatttttttaaaatattagctatctttttttgcccttctgtatataacgtatcgatatcctccagaaataatgtgccgccttcgtttttaaaattatcaattattattttatatagaaagtcgtagttgtaatattcaggaatagagtgacagcttatacatattaagctttttcttttttgaggaccatagtaagtgcataaatatccgatatcatttttacacattccatcttggccagtaataattgttggaagtggtgtgttacttagatatgatatttgagaaagaattgtttgaggaaatactgtatgtacaaagcttggtgatatttcatctggatttaatatttttataaaatcatcaatattgcttttttctctttttttataatatgtatagtcaactgctttagattttaaatctttattattagaaagagcgttgcataagcgtactgcttcatcaatagcgctttttacagcttcaattccacttgtaataagtatactattaattccaaactcttgcgctgtttcatataccatattatcaccaataacgagttcatagttttcttgttttagttctttaattaagtctctaatatctttatgttcaaaataacactttgattcgattgaataacctaaaagttcgcttaactgtttaaatgatttaaatatatttggataagataagaatatttttttccctttatatccttcagataattttaaaattctaagtatatcaaaggcattaatatgaatttcaacaataggagtttgagtaatttttctgcaaacttcagcagtaccaccccttgttataattacatcatatttttggtttatatttacttgtttcagaatttttggtccttgttcataattcccttgatatacatcaatttggaaatccttatattcagatgaaactgacattgcgatttcttttaagccaaagtagggtgctaaaaaaagtatttttgctttcataattttatttactccattaattaatttattatactattatatcaaatatataaatcaattaattaattacatatattatctatatttaaaagtatggagatccagacacttaattgcaacatatatatggagtaaatatgtattcaattttcgctgatatacatataagtctggctctcattatagaaccctataatatattgacacctaaaaaggcagttatctataaaataaaagtttgtgtttataattgaaagaagccagtgtttttacagcactggcttctttcaatacttagtagtttcttttaatataagaatataaaatattatattatcttactggacaaactccatttgcgcactctttatcaattatttcatgttcgtcatcatcatcaagttcagctaataattcataatctataggtttaacattttttatacgttcctcataatcttcctttgttgtagattcataaggtaaaagagggtaagtttcgtctgttagaggaaggaaagttataccaaccacatagtcaaaattctcatagagccaattggcaacatcatcccactcattttctcttacatgtacggtaattgaagtattgtgatcagtccaatttatcattgataatttataaagttcaagttgttctatagctccaacatcatattttgtttttccgtaaggagctttgattggaaattctataacttttgttgtgcaattttcatcactttgaccattttcattataaattggatagcattttagcttttctatcattttatatagaggatcagatgtagagattctaactcttctaatataataattagaatgtgaataatgtattcctgaacttacacatggaagtgtggatagagatccttcaggcttaattgtggtcataagctcaggaatggaaattccaagttctgagcagtatttaataccttcgcatctaactacatctcgtaaacgctttagcaataaacctaaatttttataagtcatgtttgttctatttaccatatccatcattccagttaatgatattccaacgattctatcattttgcatgattttattccaatctggaagttctacgtctactagggtcattctaatggctactctagtagatagttttattattttttctaatttatcaatatctagattattatcttcatttacgaatgaggctaaattgttagttgataggttgcagcattgatgtgaattaagcaaaatttctccacatgggttacaacctttaaatgtacgttttcttctcatagcttcacttccattaataaaaccaggttcaccatttatttttatggattctaaaattttctttattttattaagcgatggtttttctttatataaaacagaattattactcattttcctatgagatacttctgaattttcaatccaatttccattgactattgtatatagtttactttttgcatttataacatcttcatcattttcatcgcaaattatcatcattgcactatgcctaactccaccagaaactacattttcacttattatagtagctatatcaagcacatctatggaccttaagcttccattaacaagattactgcaaaccttatttattttttcaaacattctttttaatgatttatgaccagatgctctgccaccaaacctttttaatctttcaccctcaggtcttacataactgtaatcaaatgtaattttcttaatattaatatattcaggacttgtaatcaaattaaagtaagtttctagggcattacaccagccttctttgctgtcaccaattttaatcttagcgactgatggatctccatcgtctaaaataagtttggtgttttccatatattcttttggcatgaacttatgaatatcttcattatattcgctgtctagatatattctccttatattaggcatttttgatattagagatttatctattctaacaccgacacctgaaccaatcatgagaagataaaatatgtctacaaaatcatggaatttttcaaccattgtaaatgcacagttataatttgaaagtggatattcttttactatatcagttccccccatataaagagttctacctgatgtaaaggtccttaaattgaataaattatcaaataacagttcggcttcttttacttcatcttgtaaatttatgcttaatccctgtttctttttaaattctatgccaagttcaatattatattctgttgttctaagaactgtttcaaaccaagtttcccttcgttttttattgtttaaatatctagaataagttcgtaaataaacaaattcaccgatattgcttaaaggcgtattcctaatttctctgtatttgtttaaaaatgattctgataatagttcgctcatatatattcctccagttttacttaataagctaataatttctttctaatccttatattcttttgaattataatatcttcaagttttataataacattattttaaatcatttcatgataaaatacaatatgttgtatttataaaaaagtattcatacaatatatagagttgtcctattcgctataatgattaactttgacaagtaatatgaaaatttaattaagtatatttaaagaaggacttataaaataaaaatatgattttataaagagattatatgagtaattgcataaacgtgatatcaatcacagttttatataataaatcgtgatactgtaatttagtaatataaaattttaagcggctttagctatagatctaaatataagctatatgcagttacttacaggtataactgtaggttttttattgcgctcaaaagtttcataatatgaattattacttttagctaagattagcacatagaccgcttgagcagaaaggatagataaaatacaatgactaaaaatgagcttgaatcattaaaattagaaggtttcatgcagcaacaagataaagaatatttttcacttagaatattgacagatgcaggaaatttaagttctaatgaaatggtttgtctagcagaaatatctgaattatatggaaatggatacataggatttacaacacggcaatgtgttgaaataccttggattagagaagatttgattccagaggttaagaaaaggatattaaacgcaggaatcaagaccggaggtactggtacaagggttgtagctgtagctgcttgcaaaggagcactttgtaggttcggattattagattcacaagaaatagctaaaaatctcgatagaaagtttttaggaatagatcttccaggtaaatttaaaattggagtagcagcatgtcctaataattgtgtaaaagctccaatcagtgatttgggttttttagctcaaaatgaaccaaaggttgaggcagatatgtgcaaaggatgtaagatttgcgaacgtacttgtaaagttgacgcgatatcaatggtacataaaaaagcagtaatagattatgataaatgcatttcttgtgggcaatgtgtaaaagcatgtccttttaaagctatgaagttagaaaaggaaggaattgcagtatatttaggtggtaagttcggaaggaatttaagaataggaaatcgccttgaaagactttaccaacctgatgaattggaagctgttacagaaatggttattgagtattataaaaataatgctaacaaaggtgaaagattaggaacgacaataagtagattaggttttaatcatataaagaacgcattagatatatagatgtcgctatagttaattctcatttactactattttaacaattatgttattgaaacataatcaaatgaattgacaatgataaataaataaaataaaatgatattaaatgataataaagtatagtgaatgagaatgaattactatgggggagatgtaatcatgaaaaaagcagttttttttgacatagatggaactttaatggactgtttaaatggaataacagatattaggcctagggtaaaaaaaacaattcgctcacttcaagcaaatggagattgtgtatttattgcaacaggcagaccatatgcctttttaaatgaatctttatataactttggatttgatggatttgttcttactaatggagcatatgtgaaagttaaggaaaaatgtatatataaagaatgccttaaaggggattctataaaagaattagtgtataattttgagcagcgtaatattcaatacattttacaaggagaaacatattcatacattaaagatgaatataaaaaattacactctttctatgattcttttggtatatctaaaaaatatttccaatctgaatatgatctagaaaaagtagaaacatacaaaattgagatgctatataatgataaaaatggaatggattattgcttgaatttagcgaatgaggattatgattatattcataatgtcgaagaaaaatcttttgaactatattcaaaatcgaatacaaaggcaactggaatattaagagtattggactttttagatattccaatagaaaatagctatgcctttggagatggtaagaatgatatagaaatgttatctacagtaggatgcggaattgctatgggtaatgccgaggattacgttaaggaacacgctaagaaagtaactgatacagtacaaaatgatggagtagctttaggaatagagcgatttatctactaaaatagacttgcattttatttattaaaatgcaagtctattttagtattatttatattaatctaaaaaatcatatgatttatttaatgcacttaaagagtactaaaattaaaatttttcaaatattatttactgcctatattaccaagaaatatgcgagaatacggcatatataaccttttcatatgcaattatgaaaattatatctatatgtaacaaaaattacttttgtgtttaatacattcttatcctataatagggcaataccatatcggtggggaaagtaacctatattattattaggtcacaaataaaacacaaggagtggtaatttgattaaattaaaaataaatgttataaaaatttgtatatttctaggagtatgtttgttaggatttgaaacaaactttttagatccgcaaactaaaaatattcaaataaatagaattgttacaggtagctataaagaagattctaatttccaaaaagaaagtgccgatattgagaaatatgcagaatcagtaaagaaatcagatgaaggttcatctgattcagtaaatgcatcatcggtaaaagagcaaaagcaaataggtagacctattaaagcagaattaactgcatatagtgatgatcctagatgttcggggaaatggaagtcacaaacagcaatgcagacaacaacaagaataggtgttattgcggccccatctaatataccgcttggaagcaagatgtatattccggagttggaaagttataagcctgatggcatgtttgatgttgaagatagaggtggagcaattaaggtaaaaaaagatggcacttatgtaatagatgtttgggtcccgtcatatgaagaggctaaacaatttggtagaaaaactactactatatatctattagaataagaataagtataaatttaaaattactttaatatcggtgattttatttacacaaatatcctaagggaagttacatctttcaatttaaatatttataaaattatatgtaatattgttaatattcaattggatgaaacccttaggaatttttataaaaaattgtaataatgatttcataattatgacagtaagtttattagaaataaatttagtgcctttttcttgttttaaaaaatcaattgaacattaattaataagtaaggggtaagaaaattcaatataactcaataataaattaaatagatggtggtggatttatatagaaattagtatgcattactttcgattttgttgagttataaagtaagtaataatctttttcaaaaattctatcgatgtattatacttcatgtagttgcataagttatttaaagaaaaattattttggaggattattttgtcatctagtaagattagagaaatgtcaatttttgaacatcgcttttggctacaaatattaggcgatcattcacgatttattttaaatgcattgtctccagaagaaacttgttttatagatgaagcaactcaatttattaagttatttgattatcttctagaaaaagctcatcgaccaatttcgttagagaatattcatgatttaaactacaaggcatattctgcagcgatgaagataagtgaatttggtatgtattaatttaattaagatataggtggaatgttcgcttatatctttttgttttataataaattttgtatattataaagatatgttaatggaagcataatgtaatatttaatagtacatagtatactaataatataatcagaataagactaactttctcaaattatttaatattataaataaatgtaatattgttgtattaactttaatgatttaaaacgaaaattctgctaaattatgtagaaaaataatgaataagacctcgttaaatggtataattgaatatatgtgtataaaaatctaatatcagattattgaggtgaattatgaaaacctataatgttaaatatagggactttaaaactttacaattatacgtaaatagcaatgacataatgaaatataataatatattagtacaagtgttttctgggatatgcaataaagagtttataaatgaagtaataagaaatttaaaattattaattcctcaatgcaaaatagtcggagctacgtcgtcaggtgaaatactaaatggagatatatttgaacgggagtgcataatctccataagtgtttttgagaaaaccataattaaatccattttagttaaggataatatatgtgattttagtaaaggtgtgaaaatagctagtcttctaattagtacggatacgaaggtaataatatcttttggcgattcaagcattatgggcgaggaacttttaaatgggataaattctataaatgatcatgttctggtagctggtggaattgctggaaagagcgatccagcgtatgaaacatatgtttttacagaagagggagtagaaaaaaatgcagtagctgcagttgctttaaaaggtgaatttctaaatgtaaataacagaagtagttttaattgcatacctatagggaaagaacacgagataacattggtagaagataacatagtaaaaaagataggaactatatcagtaaaagaattttataacaagtatttaggtactaacaataatgatcaaattctacgtatgggaaataagtttccattaatggtaaaaagaaataacagatattttagtactcacatattaaaattcataaatgcagaagaagcacttatatctacaaagctggatattggtgaaaaaataaggattggttttggtgacttaagagaaattttgcaaagtgcaaaggaaatgtatagtgagattacaaggtgcccatgtgagagtttattaatatattcatgtgattcaagaaaaaatatatttaagaaagtaaatgcaaaggaaataataccgtttaaagatttatctgtaggtggtttttatacttttggtgaatttaacaatgtcgatgataaaaatatgttttacacagaaacgatgactgtattagcactttcagaagatgtcaatgcaagaattaaaattatatcagaaattgacgatgaatattcttatttcaatgaggaggattcagcattatataatcttataaagaatactggggaagaattaaatcaattaaatataaaattagaggaaaaaataaaagaaaaaacagatgagttagaaaaacaatattatactgacaaattgacggggttagaaaatagaaataaactaattaatgatttgtgtatagaaaaatacactaaactcacaattgttgatataaggtcttttaatgatataaatgatttttatggaaatacaataggagataaggtgttgaaagatatttctaagttaattagctggtattgcaaggagaataaattaaattcatatagagtaaattcagatatatttgctatagcaagtagtgatatatcaaaagaagatttcattgcaagaatacaatttttacaaaatgaaataaataatcaatgttttgtttacgaagaaggtaaaatttttttgacaattgtaatgggagttgcattagaagaagaattattattcgagaaagcagaaatggctttaaattatgcaaagaaaaataaagaattatttcaaatatatagggaagatcttaacatatatgagggaatcaaggaaaatataatatggactaaaaaaattaaagatgctatagctgaaaatagaatagttccattttttcaaccaatagttaataatagtttaaaaacaatcgagaaatgcgaagctttaattcgtatgattgatgaaaacggaaaagttatatctccatattttttcttggatatagcaaaaaaagctggattatataaagaactaacgataataatgttagaaaaaacttttgaagttttaaataaaactaattatgaaatatctataaatcttcttcttcaggatataatgaacagcgaaattagagccctaatcataaaaaaattaaagaaggtacgaaaccctgagaagattgtatttgaaatagttgaatcagaaggtatagaaaattttaatgaagttactgaatttataaaagaaataaaaaaatatggatctaaaattgcgattgatgattttggaactggttattcaaatttcaattatcttatgaaattaaacgtggattatataaagattgatggttcgattattaaaaatgttcataaagataagtcagcagaaattgttacaaaaactatagtattatttgcaaaagagctaggaatagagactattgcggaatttgtatctgaggaggaaatatacaataagataaaagctttaaatgtagattactctcagggatattatttttcagaaccaaaagaaaatatagggtgatttttaggcaccctatatttaagaatgattgacttaataataattaataatactttttgtagttggggaaataatgtttaatgaacttatttggttgttaaacattatttgccttttttaacttagaaaaataatatattaagcatgtaataaaggcacatgtaatctttatcataagatcggttgcagtatcttcaagacttccatttgtcatatcagttttaaaaaaataatctgctaagaactcatatatttcccatatggtgcctattgcaattgtaaaacaaaaggcaaatactaaggtgaatttagaaaattttttcttggttgtatttttagttttttctataattccctgtaaaagatgtactccgattataaccccatatacaccaaatgtaccatgaagaaataaatcccaccaccagaacatactatagaactttagagtttctcctagatataaagtagcaaatataaatattattgatgctgataaaaaactagatggaagggttattttgttagagttagcaactttaagaacaataaaaggaataaatatgcttatagcatcccagagtaaaaaaagtatataactccacggatttgatgaggcggtcttaatagctgtaataataattaatatttcaaataatattgctaatattacgccaattttactgcttttgttaatcattaaaatcaacccctttctaatgtatatacttataaatatttatagggattctaaatctaatgatatcttttccttttgtatataaaaatatgtacgtctaaaaataggcttgtcctagagtaaagtattttttatgctaatttactctaggataatgattttctataattaattcttatgaattacaggaagatttatttttttcatataacaaatcattctaattaaaaaaataacgattaatgatatatgctgagatacatgagttcctaaaagcggatatagaaaccacagtaaaagtgaaccaagaatacatgcaatgcagtaaacatcagttttgaaaatttcaggctttctattagtaattatatctctaagtacgccaccaccaactccagtaatgcttgtagcaaatagaaatagcattaaattatagtcactttcaagagctttaattccagaagagacagaaaaagctgagagtcctattgcatctattgtcacaaacatattattatattttagttttccgcgaagtataacaggaattgttgcacctaaaataataaaaggaatagttgtatagttttcaaaaaataatggaattccaacattcgttacaatatcacgaagaactcctcctcccatagctgtgacggtagcgagaatatatataccgaataagtcgaatttttcctcaattgcaacatgagccccagatgctgcaaatgcaaatatgcctagatactccaatatattaatatcattcataaatcaaacacctctttcaattaaattttatgcataaaaatagacgaattgcataaacaattcgcctctgttattttacctgaaagattctcttttaatagttaactaaaaagattgcttcttgggtgtcataagactttccagagtttcgtcagaattcggtccctttgcctgagagtttgttgcgatttcaccttcggctctacattgcttgtagcatctcccaaattcgtcacacgattactataattaatcaaaaatattataaattagttttaatagcatgtcaaactaatttattcaattcatcttcgtgtaaagtttctttttctaataattctatagcaatcttatcaagagaagctctatttttacttaaaagtttcagtgtttcatcgtatagatcgttaacaatattcttacattcttcaataacaggatttccataactactatataaaggacctacacttgatagatttataagccctaaggtttctcccataccatactcagtaaccatttttaaagcaatatcagtagtttgagatatatctccatgcgctccagtagaaattttatctttaccaaaaattatttcttctgcagctctaccacctagtgaaactttaattttatttttcaaataatctattctatggtaactggtatcttcaggaatagataatgtataacctccagcaccttttgttgtcggtataattgttattttagaaactttatcctgtggaagcaatagcatattaactaatccatgccctgcctcatgatacgcagtaagaagtttgtcttcttctttaagataacttctttcttttttttcatggccagctaaagttatagaatatgcgttttctatatgatcataagttatataatcgctgttgtctttggctgctaatatagcactttcattaactaaactttctagctttgcaccagaaaaatatactgtttttttagctatatctttaatatcaatattttcatgtggtttgttctttaaatgaagagataagattttttctcttgcattaacatctggtaatgcaacttctatatgtctatcaaaccttcctggtctaagaagagctttgtccaacatatcaagtctatttgtagctgcaattactacaattccttcttcttgtccaaatccagacatttcagttaaaagcgcatttaatgtttgatctttttcatcgttactagaaccattttttccattacctcttgctttacctatagcatcgatctcgtcaataaatattacagcttttccttgagattttgctttcttgaataaatttctgactcttgcagcaccaactccaacatatacttggacaaaatcagaaccactgagtgcataaaatggaactcccgcttcacctgcaactgcttttgcaagtaatgtcttacctgtacctggatcaccatagagaataacaccctttggcattctagcaccatacttttgatacttttcaggattcttaagaaaatctacaacatccattaaactttctttagcttcttcatttccggctacagcatcaaagtttagggctgctttcttatctttgctaaaatcttgcatttccatcgatgttacagaagaaactccaccttttgatttatatacaagcatcgcaactattgcaaaaagtgataatcctaaaattccagaaggaatagtttttgaaatagggggagtggtctcatccttaacttctattccatttagtaatagtttttcttttaaagtatcagtatgcggattatccgtagagtatttatcaccactatttagtattacagtcattttaggagaagtatcaactattacagttgatattttattagaattaagatcttcagtaaaataagaataacctttattaactacctttgaatttattgatgttactaccattactataagagacaggatagctgttattataggaataataatatagtatttttttatcttattcattaagtacctccaatttcttaaaagatgacttaaggcatacatacttatcacttattttgtatgcctgatattgattatacaggtttaaaatcagaagtctaatttctttcattgattttaccaatgtaatttttggagaaatactcaatcaaattttttcctaaatgcaaaaaacttcattaatataaatgtgattggaaggcctatgattgcggctaataaataagcaataattttgtttaaccccatcaaattaaaaactattattacaactatattttggataataaaatttgggatatatgatattgcaaattttataaatttattcaattgcagtttttctttaaaagttataagactgttcaataaaaaggatataattaaacctgaaatatagccaactataaatgctatattttcatttaaaaagcttgaatatatataagaaaaaacagttccgttaaatgtatttataacccctattattaaaaaagtaacaaattcttttgtatagaaagtatttttgaatttttgaactatattatccataagtttcctcctgtaaattttctcatctatgctaattaatttagtaaagatgagaaatcttattttttatttaatttcattatgtattttctgaatatattttagtattattcaaatgaataagagttgaagcttactataaaccatattgatgaaaccatgaacttataattaacataagtccaatggaacaatccccttaaaaataaactactatctataaacttgtattaataattataaagaacatttattaataagtttataattataatgattatgcattatatgaactcaaagataatctatcagtctgtagaaattaaagttgttacctttttaagaaagttgttacgctggctgaagagtcttattcagtaatcaacatcacttcaactataatattgttaagcaaatttatcaataaaattgatataattattgtaaatctatattaatgtacagtagcgttaatctaaacataaatcactaaaatactaatgtataatttaactatatacattatttctgaataaacgcttaacagatttcaataactagctttattaaaaagttaattccaataataatatttctaagttttatataacatcttagagtctacaaatattttaagtatatattataaagtatattggttattcatataattaaatagatttggcaaatgattatgaaatatcattgtattgcaaaatatagttcatgtaatttttagtaaactatattaaatacaatggtctttttattgaatttgaatataaaaaatatcaagagaggtatatatatgataagaccaaggcctttaaagaaaggtgatagaataggattaattgcagcctctagtccaacaaaaccagatagaatagaaccgtcaattaaagctatggaggagctaggacttgaagttgttttaggaaaaagttgcaagtgttatcacggatatttatctggaagtgatgaaataagagcaaatgatattaataaaatgtttgatgataagactataaaaggtatttttgcaataaggggcggatatggagcaggaagacttttgagcatgctggattacaatatgataaaaagaaatccgaaggtttttgcaggatatagtgatgttacagctcttcatactgtatttaatgaaaaatgtaaatttataacttttcatactccaatgatatcaaccgaattttataaaggtgtagatgattatacaatggattattttataaaaaatatatttagtgataagccattaggaatactaaaaaatccagatggacaagaaataaaaactttagtaaatggaaaagcaatagggaaattggttgggggaaatctttctttagttgcatcatctatgggaactccatatgaactcgatacaaaaggaaagatactgttcttagaagaggtagatgaatatccatataaaatagatcggatgttacttcaattaaaacagtgtggaaaatttaaagatgctgcaggcattattttaggttcatggactggttgtgatccaatagaagggaataacagtttaacattaatggagatatttgaagaattgataaagccagaaaatactccgacaatttataatttggcttgcggacattgtgcgcctactataagtattccattaggagcaagagtaaagataaatggagaaagaagcgaaatagttattctttaatttattatcaaacattatacattggagtgatttgatgaaaaatgcaatagttaataatactataggaatgttaaaacgtgagccaaaaaataattcagaaagcgtagatgaagtgctatttggaatgaatgttgaaatactcaaggaggaatttaataattggttttatgtaagaactcgctacaattacgaaggatatattaatggtatttatttaataataaatgataaattatcgaaaaaatgggaaatggaaaaaaattcaatggttattaattcttttgcagatattcttaataaaccgcaagcatctgggttttcaattgcaactctgacaagaggagctaatttaatttcaacttctgaatgcagcaaagataataagtttacaaaagttatattacctaatcttagtatgggctggataagaagtagtttcatatccagtttgaagagcggttatgatataaatgatgaagaagatcttaggaataatttagtatcatcggctgtatcctatattggaacacagtataggtggggcgggaaaactcctcttggaattgattgttcgggcctctgctctatggcatatatgttgaatggaattctaatttatagagatgcaaagattaaagagggttttcctattaaagaaataacatttaagcaaataaaaaaaggagatctaatattttttccgggacatgttgctatgtacttaggcaatggcaaatatatacattcatcaacaagtaatgatgtagtaaaaataaatagttttaataaaaattcaaatgactataatgaagatctagatagaagtttaaaacgatttggaagtatattttaaaactcattttatccttatgattcgccacttaaacaattagcaaattcttatagtgaatcaaagcatataattagcgagatcaaagaatagtaaaaatatttcaagaaaggtgcctatttgtaatattaaggcgccttttttaagtatttaaataaatattaattttcaaatatatctatattatagaaaattaaataattataaattttaagcaattttttataaatatacttacatatttgatttatagcatcataagtaatagaatagcaatataaattgctaaatatatacaattgattatttaatctaaaatattatttatgctaaattgtatgcaaattaatttcgcattgctgtatgagaaaaaagcaacttaaatatattaaaaatatgagcaaatataccaatttcgtattgattattatagacaataatgatattcttaattatatgataaataatttcatttaggaggtgtcattattatgagtatttgcagtttaaatccgggagagaaaggaataatttcatctattaaaggagattcaaaattagttaagaggttatttgcgttaggatgcatcgaaggaactgaggttgaacttaggagaacagcaccacttggtgatccaattattataaactttagaggttttgatttagctattagaaaaaaagatgctaagaatatactattaaaaaaaatataataattggggcttaaatattttaattattagcaaaataggggagacttaaataaatgataaacgtagctttacttggtaatcctaatgtaggaaaaactacattatataatttactcactggatctaatcagtatgttggtaattggccaggtgtaactgtagacaaaaaagaaggttttctttttgaaagtataaaaattgttgacttgcctggaatatatgcaatggacactttctcaaatgaagaaaaagtgtccaagcaatttttagaagaaggtgatgtcgatttaatattaaatattgttgatgcatctaatctaaatagaaatttatatcttacaactcaacttaaacaatttaataaacctataatattagccttgaacatgattgatgtttgtgaaaataaaggaattgttattgattataataagttgtctaaagaactagatgttgaagtaattccaattattgcaggaaaaaatataggagtagataaagttaaggaaagacttaaagaaggaaactttactaaaccattgaatcatagaaagtttgatttttcatctgaaaaagaagcgtataaatttatagaaaatgtattagaatcgtgtgtgacaataaaagaaaatatgcaagaaagtgttactgagaaacttgataagtttgttctacatccagttctagcataccctatttttcttttaattatggctttaatgtttcagttgacgttttcttgggttggacagccgatttcggatttcttagatgaccttttaaataatactattataccgactgctcaccaactattatccaattcttctgattggtttagttctctaattgtagatggtattatttcaggtgttggaggaattatagtgttgcttccaataatattagtattatttatatgtataactattttggaagatagcggatatatggctagagtagcatttatgatggataaattgatgagaaagatggggctttcgggcaaagcttttattcctatgataataggttttggatgtacagttccagcaattatgactgctagaactttagaaagtgagaaagatagaaaacttacagcattgctagttccatttatgtcatgtaacgctagacttccagtttatactgtatttgcggctgtattctttgaatctcatagaggattagtggtatcttctctatatttacttggagtccttgtagcatttttgcttggtatcttattcaaaaatacatatttcaaaaaagatgaagaaccttttataattgaaattcctgagtataagatgcctaaaatatcatctatatataaacaaacattagataaagctagcggttttttacaaaaagctgcaactattatttttgcaatgagcgtagtagtatggtttttatctaactttaatcttcatggtatggtgaatcaagttgatgatagtatattagcatcaataggcaatgttctcgcaccagtttttaaacctttgggttttggtaattggcaatctgcagtatcattactttcaggactattagctaaagaatcagttttagcttctatgcaagtaatttttgcaggggatttatcggtgattttaccaattcatttcactaatatttctgcatatgcatttttggtttttatactactatatactccatgtatatcaacaattggtacgatgcaaaaggaatatggaaataaattaactttgttttcaattttctttcagttaattgtcgcatggattgcttctttcttagtatttaatttgggtggttttctttataaccttgtgcatttatttttaaaaatgaatagtttgtttttttaataattgttaagaatatgattaagtatcattatcaagacttaaatcatacttttataatagcaggtaggtgaagcttaaatgatagaaatattaatcacgattataataatttcttttgctggatttataatctttaaatcttttaagaattcttcaaaaggaaaatgcaactgtggatgtaagggctgtaaatctgagaaaatctgttcagacaaaagtaatacaggtataaaaattgttcaaacaaataagcctaataatcaataataaaaaatattaaatatataaacttatccactaaaagcatagcgttttagtggatttttctttaaagtataaaatgatttatagtataataacaaaatgaagaaatttaaacctaagataaaataagaaaccgaaagtaggaattaaaaaatgaattacaaaacacatataaatggtggaatactagtaggattatatacgaattgccaattggcaaatatgccacttatgtctacggcagtattacttggaggagcttttgttggtagtatattcccagacatagatcatggaaatagttatattgggaaaaaaactaaaggggtatcaaaagcaataaataaattggctggccatagaaagttatttcatgcgccacttgtatatttgtttttatattcgactgccattggtatgtttacagataagcttatgttaattggaataaatgggatattcttaggaatattttctcatttagttctagatagcctaacgattggaggattgccatggttttacccttttagtaaaaagaggttttctatttgtatgataaagacaaatagtaaaattgaggatatattatgtggaatgcttatatgtattaatatagtaatgctacttgacatgcttcacataacttcaatatttacattcactcatagataatatataaaaaaattgcaggcgactgtggagctgaagatttttttcacgcatctgccttttcgaacgcatgtgagaaaaatttggcaggcgaatatgatttgttttttattcttttatagttattaaccctagtaaaatatactactataaagttatccacagatttaattgcattataattccctaaagaataaaaatatcctaaagattgattagtaaatctttaggatatttttataaggtgcattatgttggaaacaacaaatagcatattttaagtatttaatagcatataatataattttacttcataaaattcaattcagatttatcactatttttaatttctcttatggccaagctacaatagattaatgtaataatggagaatataaggaaaaattctggcattattattccagcaacatgtattaaggcttcaagtaaaagtggtaaactcatcgcatagaaacttaaagtacaagctctagagtattttagttttactcccataaatgaacctatagaaacagcaaatggacccaatattaagaatcctaaaatcaaattagtaataaaggaattaataggattaacaacaaaaaaaactatcggtgtaagtattttaattatggaaagatagtatcctgaattttcgttattaatatttatacttgaaaaatcagaaaagttgatagttccaactgttctataatcttttctaagatatatgctattagaatcaagaaacacagcatctttgtaagaatttagaatatttttgtcagttttacctttagtatcaataataaaagtataataatttgattgatcagtacttacgctgagcattgagtcatcgatactaaaagttgaggaatcattttcaaggttgtcctgaatacttatggcatcagagtcaagtgaatttactgtatttatgtttccaataaaacttgatattaaataaaatagaaaatcaccttcatgtttattgtaaatagtttcatctgaatcaacagataatacgccattcttaaattcaaaatttggtgcattatttgaaagatcattttgtactaccgatatttcgctagcaatcatatttatttccttaacattaattattactgaaaatagtaatgtaacaagaaaaacatataatattgactttctaagcccttgtgctaagaattcgctgtatgcttcaaaattaaagaaactataagcgaatttatctttaaatcccattatttttttcaaaaaaagacctcctaaaagaaaagttagataaatttaactgattcttgataattataacacattggataaaaatacaatagaaagtttgcataattaaatgaaatatgttatcattaccaatatcaaaaaaatttatgaaaaattaaatacggacagttcattaagaccatcctgtcattaaaaaaaactaggcattttaattttgaattattttaatttaagattaattttgttgcgctagttttagatgttacaaaattaatcttttttatatttaaatggaaagttaatttatggataagccttataaaactgatttcgaaaattttatagaaattatgtgaggagaaaaatatgtttaaaataaaaagtgaagtacaatttgatatggcgcattatttaagtgggtatgaaggaaaatgttctaacattcatggccatagatataaattaattgcaaaactaaaatctgaaaagttacatcaagatggtcagcttaggggaatggtagatgatttcggaaattttaaaaacatattaaaagagattgcagaaacttttgaccataaattaattattgaaaataatgaagatgggaaagctttggttaagaatttggaagaactacaaaataatttcaacatttatttagttgactatagacctacagcagaagaaatgtctagagatatttttaatagattaaaagctaaaggattgtcagtgtgtgaagtagaattatttgaaactcctaataatagctgcatttatacagaggactaatggagggaaattatgtttaatataattgaaaaatttttatcaatagatggggaaggtcctacttctggtgaacttgcaacatttataagatttcaaggttgcaacttaagatgttcttggtgcgatacgacttattcatgggataaagaaaatacttcagaagttctaactgcggaagaaatttacaagtatataaaagaaaataaagttactaatgttactttaacaggtggagagccacttattcaaaaaaatatacatgaattactaggacttttgaactcagatgataacttaaaagttcatatagaaacaaatggtgctgttaacataggaacttttaaaaataaatttataaataataatatcagctatattgtagactttaaacttcctagcagtaatatgatggatagaatggatctcaataatttaagtattgtagaatccaatgatgtttataaatttgtgataggaagtaaggaagatttacaaatagcatacgaaataatatgtaagcacaatttaacatcaaaatgctttgtttatttgagtccagtttcgggaaatatagaaatgcaagaaattgtagaatttatgaaagataaaaaattgaataaagtaagattgcaagtacaattacataaaattatctgggataaaaatgcacgcggagtttaataattgagtggttattatatataatatagactagcttatagtaaattttatttttacaaaaggtttagaaatacaaggaggcttgagttatgccaaagaagatagatacaaaaaagatagaggaatgtataagagaaattattgttgctttaggagatgatcctaatagggaaggattactagatacacctaaaagggtatcaaaaatgtatgaagaagtttttcaaggaatgacactttcaaacagagaaatagcagaagcgtttggaaccacatttgagaatgaagattatgattcagaaactcataataatatggttgtggttaaggatataccaattcatagttattgtgaacatcacttagcgcttatgtataatatgaaggttacagtagtatatataccaaaagataagataattggtcttagtaaaatttcaagaattgcagatatggttgggagaagacttcaacttcaagaacgtattggaacagatatagcagaaatagtttctatggttacaaaaagtagtgatgttggtgtacttataactggagagcatggatgtatgacttcaagaggaataaaaaaacctggaacattgactacaacaactacttttacaggaaaatttcaaaccaatgatttactaagacaagaagctttactaattatgaaataagtaacgaacgaagaagcagtagtgctttggtatatttctatttaattaatttattttaggaggttttgaatatgagtaataaagcagtagttgtatttagtggaggacaagattctactacatgtctattttgggcattaaaggaattcgatgaggttatagcggtaacttttgattataatcaaaaacatagaaaagaaatagagtgtgcaactagtatagcaaaggagttaggaatagagcatcatatattagatatggggcttcttaatcaattagctcctaatgcgcttacaagaaatgatatagaaataaaagctggagaaaatggttctcttccatcaacatttgttgaaggtcgtaatatgctattcttaacttttgcaggagtattggccaaagtaaaaggcgcaaaacatatagtaacaggagtgtgtgagactgattttagtggataccctgattgtagggatatattcataaaatctcttaatgtaactttaaatttagcaatggattataattttgtagttcataccccattaatgtggatagataaagccgagacatggaagatggcagatgattttggtaagttagactatataagagaaaagactcttacttgctataaaggaattgttggcgacggttgtggagaatgtcctgcttgtaagcttagaaaaaatggtttagataagtatttagaaagtaagaaaaattaaaatataaaatataaaatgaatttaaggagaaagaacaatgagtgaaagtggaagaaaatcaaaagaacttgaggggataacattgctcggaaatcaagggacaaaatatgattatggatatacccctgaagtattagaggtttttgaaaataaacacccagataatgattattttgtaaaatttaattgccctgaatttacaagtttatgcccaattacaggtcagccagattttgcaacaatctatataagttatataccaaacataaagatggtagaaagtaaatcgctgaaattatatctttttagttttagaaatcatggagattttcatgaagattgtatgaatattataatgaaagacttaataaaacttatggatccaaaatatattgaagtatggggaaaatttacaccaagaggtggtataagtatagatccttattgcaattatggaatgaaaggaactaagtttgaggatatggctaattatagaatgatgaatcatgatatgtatcctgagaaagtagataatagataataacctaatgtattgcataaatgatttatattaattagcaaagcaatgactgcaatacatttttattaaggagctgatatttaaattgagtaaagtaattgttataggtgcagggcctgcaggaatgatggctgctatacaagcagcgaagaaacatgatgtaatattattagatggtaatgaaagaattggaaaaaagcttttcattactggaaaaggtagatgtaatgttacaaatgcaaaagatatatctgagttttttgagtatattccaggtaatcctcattttctttatagttcattatatagttttactaataatgatacaatgaatttttttgaaaacgaagggattaaattaaaaatcgaaagaggagacagagttttcccagaatctgataagtcttcagatataataagaggattatcaaatgctttaagtagaactaatgtaaaaataagattaaagtcaaaggttactaatatagaatttaaaagtaatagaattacagcagtagaaattaataatgaagaacgattgtatggagatcattttatttttgcaacaggtggtgcatcgtatccacttactggttcaagaggagaagggcaaaaattcgcaagtatacttggtcataatgttactcaattaatgccagctcttgttccaatagaagttgttgattccaaaacaaaagaattgatggggctgtcattaaaaaatgtggaagttacaattaaagaaaatgacaagaaagtagtttataagaattttggtgaaatgttatttacccattttggagtttcagggccccttatattaagtggaagtagatttatagaaaaaggaaaaagatatactttgcatatagatttaaaacctgcattaaatttaggagaattagataaacgtatccaaaaggattttaataaatatttaaataaagatttcaaaaattctttagacgagttattaccacaaaaattaattcctgtaattataaataactcaggaatattcgaaaataaaaaagtaaatgaaataacgagagaggaaagaaagactttagtaaaggctattaaggatttgagctttgatattaaaggattaagacctatagatgaagcaattgtaacttcaggaggtgtagatataaaagaaattgatccgtctaccatgaagtctaaaataatagaaaatctttcgtttgcaggagaagttatggatgtagatgcttttacaggtggttataatgtacaaatagctttttctacaggatttatagcaggaagtaatatttgatataaaaaatatttccttgtttggaaaggtaaaaaattatataatcttaatgaagacataaatttataggatttggaaatgaggagaaagttttgaaaatttcagtagcaatagatggaccggctggagcaggaaaaagcactatagcaaaattggtttctaagaggtttgatcttatgtatataaatacaggagcaatgtatagagctgtggcgctaaaagcacaagaacaaaacttgcaaccagaaaatgttcaagaaatttgtaatataataaaaactatggaaatgcattttgaaaatgatgatttgattttaaatggtgaaaatatacaggataaaataactactccaaacataagtagtattgtatctggatatgctagtatttcggaagtaagagctattcttgtaaaacttcaaagagaaatgtcaagcaaatttagtgtaataatggatggaagagatattggaactgttgttctaaaagatgcaaattttaagtttttcttaacagctagtccagaacaaagagcaaccaggcgatttaaagaattgcaggaaagaaatatagagtgttcttatgatcaaatactaaaagatataatagatagagattataaggatactcatagggctacagatccgctgaaaaaagcagatgatgcaattgagattgattctactaatttagatattaatggtgttgttaatgtaattgcagagtacataggaaaaggaaagtaacaaggagatagtaatgagtaaagttattctagcaaaaaattcaggtttttgctttggagttcaaagagctgtaaatgaagctatacggattcaaaaagaacataattcgaaaatctatactttaggtcctttaatacataataatgatgtagtaaaatatttagaagaaaataatatattttctatagaatttgaagaaatagataaattaaataaaggggatactattgttataagatctcatggtgtatctgaaacagttttagatacacttgaacaaaaggaactaaaagtcataaatgcgacttgtccttttgttgctaatattcaaaaaaaagttaagaaatattcaaaagaaggatatcatatagtaatattaggagataaaaatcatccagaagtcattggaattaatggatggtgtgatgataaagcaattatcactaaagatggtacttttgatgaagaaaatatgccgcataaggtatgtgttgtatctcaaacaactgaaaagatgaagaattgggaagaaacactgaaaaacttaagttatgcaagagaaatattagcttttaacacaatttgtgcagctactgatgttagacaaagaagtacgaataaaatatccaaaaaaacagatgctatgatagttattggcggaaaaaatagttcgaatactactaagttatatcaaattgctaaagaaaattgtgaaaatacaattcatattgaaaacgcaaaagatctaccaataagttttataaaaaataataatataaacaaaataggagttacagctggtgcatcaacaccagattggattattagggaggtactagatattatgaacacagaaaataataattttgaagatcaattatcattaatgaacgaattagacaaaagatttgttattggcgatgaggtacaaggagaaatactttcaaagactagagattcggttatagtttcacttgttggatacaagtcagatggagtgattccatttacagagttatctgcaaaagaagatccactaacatttgcagataaacttaatataggtgatactattaatgcaaaagttataaaactacaaaataatgatgggtatgtagtattatcaagattagaatatgaaagagaagaagcttttaaagaacttgaaaaaatatattcagaaggaacaacatttgaagttaatgttaaagaagctagagaaaaagggatagtagcagattataagggagctagaatatttattccagcatcacaaattgacataaagtttactaaagataaaagtgaatatgttgggaagaaattagaagttaaattgatagatttttctctaaagaatcctgtaaaattagttgcttcaagaagagttttattagaagaaagcaagaattctgaagacgcaaaagcttgggagagttttaatcttggggatgttataaaaggtgaagtaaaaagatttacagactttggagcttttgtggaagtcaatggtatagatggattattacatttatcacaaatttcttggaatcatatcaaaaaggtaagtgatgtattaaaagaaggtcaaattattgatgttaagatcattggtcttgataaggaagctaaaaagctatctttaagcattaaagaacttgtagctaagccttgggataatgctaaagaaaaatatccagaagggtctattgtacttggtaaagtagttagattaaatgattttggtgcttttgtagaattggaaccaggagtagatgggttagttcatatatcaaagatatctcataatagaatagagcacccttctgaagttttaaaaattggtgaagaaattaaagctaagatattaagtgttgatgaagaaaataaaagaataagcttaagtataaaagatgtataaaacaaaaaagtagaaggaatattttcttctacttttttgtttttttatgtagagttaaaataatttttatgaaattattttaactctagaaataggtaatgtatacgtagattttaattatatgcataaggtaaagaattgaagtataatattactatgcgtaatgattattggatatctaaagttcgtaatatttaaattttaattgttaggaggctatatacttatgaaacaaaataaagttactaaagtaaaatctttagtagagactaagtttttgagtttatatgaagcagagtatgaaaataaagttggaaatataagaacgtggacaatagcatccagaaaaaataatgaaactatacaaaaacaattttttgaaaataaagaagatacggcagatggtgcaataattgcagcataccataaagatgaaaataagattgttataataagacaatttagaataccacttaatgattatgtttatgaattaccggcaggtctcatcgatccaggggaagattctattagtacaataaaaagagagctaatggaagagacaggtcttaggttagttgaagttatcaataataagagtcttgataaggtgtatgtttctgcaggaatgacagatgaatcgttagctatggtttattgtacttgtgaaggcgaaataagtgatgaacaccttgaagacgatgaatgtattgaggcacttctaatatctcaagatgaagctaaagaacttatacagagtaaggagaaatttgacattaaatgttttttgctccttcaaagttttgctttgctaggaaaaaaagtatttcaataataaaaaactggtatacacaaaaaaagtgtagaccagttttttattataagtcttcatagataataaatttacgcttaaagctctaataaacagagtctttaattaagtttagagtgtagaaaatcaattgaaatatatggattcatatattttcatattatttaattactgaatttaaaccgaaatataataagaaaataaatgatgtaaaatacatcagaatggatacttcttttccttttttataacacagcttgcaaataggatacaatataaagcctaatgctataccatcaacgatgctatatgttaatggtattaatattattgtcataaaactaggaaatagttcgcttaaatcattaaagtttaaattctttaagttctgactcattaaacagcctattataattaaaatgggagctaaggctacatctggtatgatagaaataaacggtataaaaaaaattgatagaagaaatagtataccagaaattaatgaaactaaacctgttcgtcctccagctgttattcctgcagttccttcaactgttgatacagaagggcttgaaccaaaaagcgcacatccaattgtagataatgatactgctatcatagcgttagaggttttgtctgatttttttagtattcctgaaacctggctatgaagtatcccaatattctcaaaaacaagtactaaagttaatgaaaatgttccaacccagaatttaattgtatttattccactaaaatctaatttgaaaagtatattactatattcattaaaatttggcatagtataacttataccttgtgtttcaacgataccaagctttatgcaaaatatagttccggctataattgaaattaaaaagcttccaggtatatttttaaggaataagattaatgttagaatcattatgaatataaaagctagtacttgaatacttgtaatatctccaagttttaacatagtagaagaatcagatactataattttagatttttgaaatccaacaaaagttataaataaaccaattcctactgtaatagcttcttttaaattttgaggaatagcttcaataataaacttggataatggagttgttgctataagtacaaatattaatcctgagacaaaaactgaagctaatgcttggcaataatttaagcctagagtatgaactattgtatatgtgaataatgcattaattcccataccaggcataattataagtggagtattacttattaaagcaattaacaagcaacctacagctgatgatattgctgtagcgatgattagaggctccatagaaatgccaccatcacttaatatactggcattgacgataatgatgtaaactgcagcaacaaaagaagtcagcgctgctatagtttcgcttttaattgtaacattgttttcttttaatttaaaaaatctttccatcctttcaacctatctttcataactccctcaccctcccacgctaaaatgcgcatattaattataacatcattatcatttatgtcaacttttatatatagcttgaaatcttatacaattcatttatactccatagtattgcatgagaataataaaataatgtttaatcacaaattttgaagaatatatttataatcgctccttacgtatacacattgtgatttaaataagaaaagaatagtaaaacaacactaagagtagtaatatattactatacgtattttataaagggggcatacaagtatgtatacagaatttgaacaaataaacaaagcaagcataatgataaattcattatgtatttttaagaatctaaaagatgacagtgttttattaaaatataagacgctactaaagtaccttaatagtaaggatatatcagtggaagagggcattgaattatatactgattttatttatgaactattaaacaaagctgatggaaaatcattaaaaaagtatataattgatatgatttttctcgataataatccatttacaaaaataattgacgaacaaaattcatgtgatagactttttaatcaagtgcattatgagttaaatgctttgcagtacatatctagtatagaatcttctgcgattaaagatgctataattattaaaggaaacgttaaagagtttgaaataggtatagttaagtcgcttatggattttgattctgacttggaatgtaatatctcaagcaaagctattgataagttaaaggtaaatatattaaattgtgataattggggagatgcattggagagcattgtagaattctacaagcaatatgggactggcatatttggggagtatagagcgtttgtatgggaacacgaagatggagcaccttatcttagaggtattgaatcaccagatccagttaggctagaaaacttagtagggtatgaatatcaaaaagagattataatagataatacaaaacagtttttaaatggatatcaagcgaataatatgctactatatggatcaagaggaactggtaaatcttcaactgtaaaagctattataaatgagtattacgatgatggcttaaggcttattgaagttgataaaaataaattatgcgattttacgaagataattaggatacttaaaagtaagaatttaaaatttataatttttgttgatgatttagtatttgaagaaggagaagctagttattcagctttaaagacgatattagaaggtggagtagagaatagatcaaacaatattctaatttatgcaacaaccaatcgaaaacacctagtaaaagaaacatttagcgaaagatctggtgatgatgtgcatgctaatgacacaattgaagaaaaactttctctagcagatagatttggtatgactgtatcgttctattcgcctgatcagaaagaattcttaaagataatagatggagtagcagaagcaagagggattaaagttgagaaggaatatttgcatgcagaagcattgaaatgggtaagatggtataatgctcgttcaccacgaacagcaattcaatttataaattggctagagggtgcgttaaaacagtaactttatattaaaagtttgtgatttgttttggaatattctataactttttagctaacaaagtgataagagctagtaaaaaattctttactagctctgtattttttataataatttaagcattagttgttgttgggggcgtatatactcttgtagcaagttcgtcgtctaacatatacaatgctgcagagttattttcgcatctcctaatctttttgattatagtgttaaatgtattttcttcttcaacttgctcgttaataaaccaattaagtaaaccgattgttgaatgttctttttcctcagtagctatatctgcaattttatatagcctgctagtaaccatttgctcatgttcataacctgcctcaaagacatttaggatattgtcaaaatcagaatgtggtttttcaatttgttctaaagttacagttccatttttctgaaatatgtagtcatagaacttcattgcatgaaataattcctcctgtgattgaactttgaaaaaattggcaaacccacttaaatcaatagattcgcagtaagaagccattgataaataagtataggctgaataaatttcaaaattaacttgctcatttagttttgcgatcagtttttcacttaacatactaatacctcccataaataaaaacattataattaacataatttaaaaaaattcagaaaaactataccctatagtataaaagtttaactttatattctgaaatttttaactatatattaatatattacatcatataacataatttatcaaataatatttattattatgttacataagtattattgcaaaactaataatataaataagagaggagatgatataattgacatataaaaagaaggaaaaatcgatacaaaaaactggagatatgtcgcaatctaaagttaaatcttttgtagagagagaagaaacaacaaacaaggtggtatctagggggagagatattacaattaatcaaaaacattaaaatttaatctatctcaaaatattaattaaaaattaatagaaatttagtggaattccattctactaaatttacttacatatattttgagatagaaattttcctattataaagatttatctagttttatatgatagaattagataaatatagaaagaattaaggaggacaagttataaaaaagttattattattttattaatatataatacattgttattgtaaactactaaaaatatttatttgtaatacggaaggatagataaaatgtcgataaacagaagtgcaccagaaaatttttattatgacaatgcggagaaaactaataaaaattttatttataaaaatcttaaaagaagtaaatgctataactgtaatttttcaaactcgaattttgattttgctagcttaagaggggctcattttaagaagtgtaatttttttagatgtagttttaaaggagcagagtttataggatccaatttaaaaggatgtaagtttagggaagctaaatttgaagacacggtatttgaaggagcaaatttagatggagtaaattttgaagatgctaaattcaaaaataccatatttgtaaactgtgatgtgactaaggctaagaatataagtgaagataacaagaacatcagaatttttgatacaatgccagaagttgaaataagcgatgaattagaaaagttgatttcaaatgtgatggaaaatgaatttataaaaaaatcaagggtttttgatactaaagaaggaaaaataaatacattatctttattaattctaaaagagaaatttgatgaaccaacgcttttagaaggtctacattatattagatatgagattgatagagatttttatacattaagttatgttattaggcttatagaaaatatgtaaatgtaagaaaaggagtatttcgttttaaatgaaagctccttttttgaattcttaaaaaataagttaataataataatagatacgcaaaaatacttttttatgaacctattattttgcaattaatatatatttattgaatatctatatagtaataaaaaatgatgatgttattatttttgaaggaagaatatagatggaaaaaaataatttaattaaactaaaatataataaatcttcaaaaaaagtaaattcaaatgatttcaagatatatactcctgaaatgatagaaaagtataaagattaccaaagaagattattaaaaattaatgaggataaagtcaaggcgaaattcctactatatagaaagatttataattactattctcaagaaagttatctagatattagcattgaaagaatttatattaaatcgaagttagattcatatacctttggaggatgtggaataggtgcatcaattttagcaggattaacagcaagtggcattttttcttatatagataattatataaaaaaacttagtccgactttcttgggcatatatattgtattgattttagtatttgggctcaaaattctttcaaatgaagacagtaaggtagaaatgtataatatgtttttagaagtattaaataatctagaatatgataaaaatgaaaaatgaggataattaaaataaggataaaagtctacaatagtgcacaatatattcttgtagaaaggaagtgcttataatgagtaatgaatcaaaatcaaaatcaaacaatcttcaaagcttttctagtacaggtggcactagtaattcggatttatctagcaaagaagaacttagagaacaaaaaagtgcagggtgtaatcaatgggattctgtaccacgtacttatgacaaagaagagtctacacataaacatgaaaaaactgctactaataatcaatggacatctacatctaagtaagaatttactgtaataaatactactttaaataaagagggagtggatattatgagtgaagaaaataaaaaacgtgagtctgataaaatgaatgatggttattatgattatcaaggtggatatatttcttatgaccctgaagttttaacagagcattatactgtaaaaggatttgaaggtaaaataaaagataagcaattatcaaatagtaaatggtgttaatgaataaaaatataaattaagtatatatattaatataaaatacttaaagtttccttcatatagatttgctgttacctatatgaaggaaacgatttttatgaatcatactattatcaataaactacgatattatattttaaattacttaaacttttaaattgaaaatatcctaatatatatttatttatatattattctatatattaacacattgtttaagtctatcaaaagttgactataatttttgtaagacttataatttatttattaaaggggaaatgaggaatttttatggtttttttagaaaaattatctttattcaatatgaatcatttcaggagattatataataggagtgaagatgcatattcgtgcgataaaagcttttttgaaatttatgatgatgaatcttttgtagtaaaatatataattcgtaaacaaattagactttttagagttaatagtgaatatgtgggatatatatggtacgaatatccttcgtataatggttttagtaatatatattctatatatttgaaagatgaatatatacatttaattaattctaaaatcttatcattttttaatgctagtgccttcagattcgatatgttagcaaactcaaaggcttcttttataatgaaaaaattaaattttgatgttaattctaataacattttaatgaagataaggacaagcaatattaaaaataatttttgtgaaaatagaatattttttaaacactttaaagaaggacaagatgaagaattaagatgcagaattcaaaattcggtttttaatgaaaaaaatagagttcctttaacgattgaagatatatatagggaagaagaggaagactattatataaaagattttggtgtttttatatgtaacaataatggacgagttgtcggatatggtcaaattattttcaatagaggattttatactattgttaatttaggaatattagaagaatacagaaaacatgggtatggagagttattggttagatatcttatagatttatgttatagaaattctataaaaactgtttatataagagtagaaaagaataatttaaaagccttatctttgtacactaaaattggatttagggaatatcaatcttttattagttggtataaaaaaattaattaattagcgttaggagttgtctatgagtataactcctttaattatgcataattatagtcttttatttagaattattatttgttataatactatagaaattgtaatttatacggaggaacaataatgaactttgatatagaaaaactagatagccaaatggctagtgatgaaaaaaaattattctttatacaaacttatggttgtcaaatgaatgaagaagattcagagaaactttcaggtatgcttaaaaggatggggtatgaaaatactgagaatagagatgaagcatctataattatatttaatacctgctgtgttagagaaaatgcagaaaataaggtttttggaaatcttggcgctttaaaaaagcaaaaggaaaagaatcctgatttagttattggaatatgtggatgtatgatgcagcaaaaagggatggctgacgatatattaaagagatttccatatgtaaacataatatttggaactcataactcgtataagtttcctgaatatttaaatagagttaaaacagaaggtgttcaaattaaagagattattgataaggaaactgaaatagtagaggggatacctatagatcgaaaaagcgatattaagggctttgtaactattatgtatgggtgtaataacttttgtacatattgtatagttccttatgttagaggtagagaaagaagtagaaagccagaagatatagtaaatgaaataaaagatatggtaacaagagggtataaggaagtaactcttttaggacaaaatgttaattcatatggaaaaggattggaagaaaatattacttttgcagaccttctaagaaaagttaatgaaatagagggacttgaaagaattagatttatgacttctcatccaaaagatttaactttagatgttgtatatgctataagagattgtgataaagtatgcgagcaaattcatttaccagtgcaaagtggttctgatagaattttaaaagaaatgaatagacattatacaaaggaacaatacatcacgttagcaaaaaagataagagctgaaattccagatgtaacattttctactgatataatcgttggtttccctggagaaactgaagaagattttagtgaaacattagagctagctaaagaagttcgatatgatgctgctttcacatttatttattcgagaagaaatcatactccggcggataaaatggagaatcagataccagatgaaattaaacatgaacgtttcaacagattagttgagatagttaatacgggcatagctaaaggaaataaggatgcagaaggaaagatatatgaagtcttagttgaaggttatagcaaaaatgatgaagcaaaactaacaggtagaacgaggaacggaagactagttaactttgagggtggggaagacctaatagggaaattagttaatgtaaaaataattaaagctaattcgttctctttaattggagaagttgaaaagtaaaaaataaatttatgatttaaataaaatgaatttaaaatagtctgtatagattcttaataggagaggtgttataactttccctaatgatcatacagactattttctttagttggttaaaataaaaaaatatgagtagatacgaacgtttgttcttaaactataaaaatagcatttttgttcagcatacatattgttgcttttataatttgaaaaaaatataaattataggttaaagaacttcaatgtggggtttatcagatgataaaaataaaaaatatttcatgatgtgatgatatcttgtggaataaatgccatttttatcacctgagaacatttgttctgtaaaatataagaattaatttgttattttttaaaatatatagataaacagcttaaggattagatttattagatgaatatattttcaaatttactaagactttaagtttgtatattcacaagaaatcataaatatatttgtggagaaaacatttgaaaatgagcttttaaaggttcttagctgtaggttgttccagcttagcttgtcaaactgaaagttggaacgtgctaaagtggctacaacctgctgcttagaaccttaagcgatattttcatagcttttcggaacaaaatatttatgattttggtaagttatcacataaatttagttttagagttggatatctataaagaacttatcttttgattgtgacaattgtttaattagtttttgattatatctacaaatgaacattctattgctttttttagatcatttggattcgtttctatttgagaacctatttttcctccactaaatacaattgtatcaaataataacgcgttttcttgaataaaggttttaaatatttttttcataccgagtggggaacagccacctctaatgtatcctgttactttgtttatatctttaacatgaatcatttctatatttttttcacctgcgattttgctggcttttttcatatctaattcttcagcaactggaataacaaaaacataaaattctttagaatgaccttgagttactaaagttttaaaaacttgattaacatctttttctattttgtgtgcaactgcaacaccatctatcttaccatcattattttcgtagctgtgagttgtgtaatttattttattattatctagaattctcatagcattagtttttccttttccttgagccataatttcaacattcctccgtaagttttagtttatattcattactaatgattaataacattgtttatttaaattatatcataaaagcggatatagttttttattttgagattatttctatacgtgaattttagatacaaaaattatctgaatttgatcaaaaactgagtttggttattatgaatttgaacttttgttaaatgtataaaatatagtattgaataacgttcgaatttatttttttatcagaatcgaatactatttaatggaaatataattgtgaaaatgtgagaaaaacagtttggtgataattattatcattgcgtggagaaaaagaagaaacttgatagtgtttaaaattaatgttttttatatgaaaaatcatttatttttttatttcgaataagattaaaaaatattcctttagaatttatgattgaagttataaattttgattaagttttaatgattaacaatatttgaggaactgaattataaaagtttgatataaagtattgatgataaatagtttttaataagaaagcacaggaataattttggcgttcgtttaaatgaaaagactaaaatcataataaaattaactgaattattataaaaatagctaataattatttcgctaaatatacatttagcgaaataattgcataaatttatgatatttgatataatatttttaacttagtataaaattactttattagaataaattttatcaatgataatttaaattattagtattgtaacttaattaataagaaatttataaatgttgcaggtgaaaaaatgaaatacgatattcaggttcttaagaataataatcttccagaaagtttagtcgattttttaaattatttagaaacgattaaaagcacatctataaacacaattgatgggtatagaatagatttgactatattttttagatttatgatgatttataaagggaaagtaaattctgactctgttgagtttgaagatatagatataagcgttattgatgatgagtttttaagaggtataaaacttagagatttgtatgcgttcctttctttcacagagaaatatagagataacagttcatatgctagagctagaaaagttgctactctaaagtctttttttaagtttctttttgggaaagctaaagtgatcacagagaatccggctttagagttggaatcgcctaaaataaataagcgtcatcctgtataccttactctaaatcaaagcatccatctattagaatcattaaacaaaaatgataaaaattactccagagactattgtattttgatgttctttctgaattgcggaatgagactttcggaactttgcagtattcaaattgataaaatcagagatgatactcttactatcataggtaaaggaaataaagaaagaactgtttatttaaatgacgcatgccttaaagctttagcaaattatttaaatgtacgagatgactctaaggctttgccggataataaaaagtttttatttttatcatctagaaatggtcctataaataaacgtacggttgagataatgataaaaaaacatataacgaatgctgggttaactgatgataaatatactccacacaagttgaggcatactgcagcaactcttatgtataagtacggaaatgtagatataagaagcttgcaaagtatattaggtcatacaaatatttcgactacccaaatttacactcatgttgacgacgattcgttgagagatgctgtaaaatcaaatcctctttcaaaattgtaattttatcattaaaatttataataaaaggtttctactactctcctactatgctttggtgttgcttaaattaaaaaataaaaggttactttattttctatcgtaacctttttgtgcttaatataaatatttttagtgttgtggtcttagtgtgtttccgtacatttttccaaactcgtcaacatatgcaggttcttttccttcataaacgataagagtatttccctttctataataataagggctcgtattgctatttgcattattgctgctagcattcattccgtttggtacgattctgttgatagcccattctagctctgttggagaattatactcgtatattctaactacatctccacctaataaataatcagtttcatttcctttgaaataatcatttttgttagtgttagttgattctttgacatcatatccggcatttgtgaaatcgtttttaaaatcggcggctctgtatgttgtatcattagtagttagacctgttctatccctcgtagtatctgaagtcgatccggctacattgttttgattagtatcccctactgcattattttgattggtattccctcctacagttccatttcctgctgcgccttgcatatttccgctagttccaccttgcatgtttccgtcagtaccattttgagcattattagcgccagtacctgttccatctacacttccacttctaatgccatcgtttgttatgtcgttttgtctagtgacatcattatttgttcttgttcttgatatgttaccacacccaaacaaagatattgaaaccaaaagaattgctgtcaaattcaacgctaaaatagattttcgcttcataataattcatcctttcttgtgaaatcttctacgaaattattatgtgaaataaagcgaaaatctatgcatttctttagtgtagtctacaagcttcttttattcgattgatttttttaatcttctaactccaggatatacttcttctgtcatttcatcgaggatcagatcatcatctaaactgatctcatctaaatattcaatatgatcaaaagcatcttcgtaagcgctgtcttcaagattaaagtcatttacgtcaatgtcatttgatgtttttgcaaacttattatatatagattttaaatctaatttatcttcgttaatttcatgtaattcatcttcacttaaggatgcttttaagtcatttaaaaattcttcttctagtaattcgttctcttcttgtgttttcgcaatgtcttctattttaatggcttttgtatctatgccgttgatttgcaaacacttaccacaattatcacatattttattttcatagatatcgcaataatcatcatcagtatatttatatgtcatttaaaacacctcatttttttattatggaaacttaattataccaaaaacaataaattaaatcaaattttttatcgaagatagaatatcaaataaagaataaaataatttaacgtagataaattattaaatgcaatctaattatttaatctaaaatatatcattccattctatatatttactaagtataacaacagccttttctaggtaagtcttttctacttcagtaaatctttcgaattcttcactatccaagtctaaaactccaataagatttccttctttaattataggaatgactatttctgaatttgaagcagcatcacacgctatatgtccctcgaaattatgtacatctttaacaagcaaagtttctttttctaatgcagcttttccacaaacccccttccctatttctatttttgtacaagcaggcattccttggaacggccctaatacaagagtattatttttgaccaaatagaatccacaccaatttattcgatctataagtgaattaattaatgctgatgcattacaaagctttgttattgaagaatcttcatctccttgaatcaaaccttcgagcattataagcatgttgtctaatttgttttctgtactcatgccttcaaaaattttaatatcaaacatatctactaccgcctcaccttgaaactatcgtcccaaaaaaataattttataaccttaaccttagttattctactataaaataatactaccatttttaattaattggaatacttagttaatatattgtattccaatttagtgtgtatctaaaccaaatacatactacctataaacactttagaacacaagtttgctatgttatatagtatatgttataattattagaagaatagtgaggtgtttgtaatgtcagacgaaaaagataagcaatcagagatatatgaatttttaaaaagttatacagagagcaaaggttatccaccttcagtaagagaaatttgcgaagcagtctctttaaggtcaacttcaactgttcatggacatttaaaaagattagaaaaaaagggaatgattaaaagagatccttctaaaccaagggctttagaaatagcagaactttcaatgccgaagaaagaaatgattaacattcctattataggcaagattacagcaggtttaccaatacttgcaaccgaaaacatagaagacacatttacgcttccattggattttataaaacatgatagagaattgtttatgttgcgtgtttctggggaaagcatggttaatgctggtattagagataatgatttagctattatagaaagtgcacaaacagcgataaatggtgatatagtagtagctttaatagaagatagcgctacaatcaaaagattttttaaagaaaaagatcatattagacttcagccagaaaatgatgctatggatcctataatagtagatgattgcatgattttaggaaaacttgtaggtatattccgatcattttaaacaaattactttgttattgatttcgaaattatattataagatagtaaattaatagactattaaattttatgatctataaaatttaatagtctatttttaattttatgcctacttacatattgggaagctagtgataaattagtgatattatttatcgacttctaatactttgctcaacccaataagtattccaatttttccatgatcaaagtttaatccaccttgaatatatgctatatatggctctctaactggtccatcagctgataattcgattgttgaacctgagataaatgagccagcagccattacaatttcactatcatatcctggcattgcccatggctcacacactgcaaatgcatctataggagatccagcttgaataccactacaaaaattaattaattttttagcgtcgccaaattcaattgcttgaattatatcagttcttttatctgttgatgaaggaaataccttaaatcctgcaatttccattacacgggcgcagaatattgctgtttttacagcttctattgccacgtgaggagcggagaacaatccttgatataaactcctcataagtccgtatgtagcgccatattcgcctcctacacctggtacagtcattctattagcagccgcatcaacatactgtctctttcctacgatgtatcctccacctggagcaatacctccacctatattcttcataagtgatccagccattatatctgcaccatattctgtaggttcaacaggttcaataaattctccgtaacaattatccacaaatataattacatcttctcgtatttctcttatatgtctaataacttcagctatttcagaaactagaaaagattttcttgaagcataaccagtgcttctttgaatatgtataagtctaatactcggatcatttctcaatgcttcttgaattttatcaaattgaaatttacctttagtatctaaatctactatatcagttttaattccatattgatctaatgaaccagcgtttttcttttctgatagtccaagaacgccaagcaaagtatcataaggaagtccggaaacacataagatcttatctccaggcctaacattaccagcgatagcacatccaatagcgtgtgtgccactaacaaaatgcggacggacaagtccggcttcagtattaaagatattagcatacactttatctaatgagtcacgccctaaatcatcaagtccataacctgtagtatttgtaaagtgagagtcgctaattttttctaattgaaatgctttaagtactttaagttgattaaattctctaatttcatcatattccttaaattgagcttcagtatcagataaagcctgtctatatatttcaaatgtcctttcgctaatattataattcttaattaaaaattcttctgtcttttttaacatatctaagtctcatcctccaaagtttagaaatactcaaaaataaataggcaaaaatgcctatttactaagtagtttcgtattcgttatctgcaaataaaattggtttagttggcgttatagttgatattgcatgcttatatataagcatttgcttattatcacaatccaaaataacagtgaaattatcaaaaccctttacagtaccttttaactggaatccatttactaagtgtattattatttgtattttattttttctcgcattatttagaaatatatcttgtaggttgttttgttgcttattgaccaaaatataacacctccataagtgattttattactaatattataacgctagttctttattatgtcattaataactttatctaaaatttcatcatcactcataatatccttatctaaaaatatacatcttttatcacgtctaaaccatgtaagttgtcttttagcgtaatttcgagatccttgttttatcatatctattgctttttctagggttattttaccctctaggtagtataatatctctttgtatcctatcccctgcatagattgaatatctgaattatatcccatttcttttaatcttatgcattcatttagcaagcccttttccatcattaaatcaactcttttattgattctatcatataatttttctctattcatagttagtacgtaataatatacatcatattcactattgtaaaaatccaatccaacattatatgagctaaaaggcttattggtaagtttaaaaacctctaacgctctgataactcttttcctgttgttagcatgaatttctttgtaacttatagggtcaacatctttaagcatttcatgtatatattcattacccttttctaatgctaaagtttctagatattctctataactttcatctttttctgcttctgtaaaagtcatgttgcaagttaatgaattaatgtataaacctgttcctcctgatattattggaaattttccgttacatataattttttctaatgcttcttcgccaagttgcttaaaatctgctactgaaaaaggagtatcaggttctattgcatcaattaagtaatgctttatcccgttcatttcatctttagtcacctttgcagaacctatatccatatatttatagatttgcatagaatcagctgaaataatttctccatttaaattttttgctaattttattgaaagatcagtttttcctactgcagtagggccaccaataactaataatttttgcttcattattttatcccttcgttaataattttaaagtttatattcatttataataatacaaaagcattatattattcttttaaattttttatcaatgtctatacttgtaaattttattattacaggcctcccgtgtgggcagtgaaaaggatcatctatatatcttagatcttcaattaatttaatcatctcattcatttctaatttatcatttcctttaatagctgctttacatgctttagttgcaatagcattatgttttacttcacttgtttttccgtttcctaaattttttaaattatcaagtatatctaggaacaagtttttaggattaagtcgtcctaagaagtacggaacttcttttaaagataatgaacttccaccaaactcttctaataaaaaaccagcttctctaaatatgtctttattctcttcaaaataagaataatcatcaatactcaagtcaattatacttggaacaataagaggttgaattataatagtaccttcttcaatttctttaagatatttttcaaataatattttttcatgagcagcatgctgatcaatcatgtataaggtaccgtcatactctcctaatatataagttttattatattgacctattatagtaattggtggaaacttagcaataggatttggcttaatattttcgtatttgttttctgtaattacgttttctataggttcagaattagattttatttcatcttctgcattgtcactataatcatcaaccaaattttctatatatgaattaggcttaagatctacaggaatacttataggctcttcattttccttgttataatcagtgctttcctcaactattgttttattaatattattcaagcttggatcatatacacttttaaagctactctcgttattagccttgaggtcttttccttgagatattaaagtctttgctgcagaacttgcaaatttaaccttttcttcttcttcttttattttaaaagtaatctcctcaaatgttggtagtggttctttttttgtattttcttcttcttttatcgcaaaagtctcaaaaacttcattttttaatgcagtatgaactgctccaaaaatctttttgaatatcattctttcatcattaaattttatttcagcctttgttggatgaatattaacatctacatattcaggatatacttctataaataatataaagaacggaaatttatttactgttgaaaatgacttaaatgcttgctctacagctattgctaacgccctattttttatgtatcttctatttacgaaaatactttgattatttcttgatcctctagctatttcctcagttcctacatagccataaacagttattaaatcggaactatcactaaagtaaagtatattatctgttatagatttaccatatatagttcttattacatccttaagatctccattaccaaaggtatgcaatacttttttgtgattattatacaatttaaaacttattttaggatttgcaagtgataatcttgttactatatcatttattaatgaactctcttttgatacagattttaagaacttcttcctagcaggaacattaaagaatagatcttgcacttctagtatagtgcctttatttattccacactctgttacttctgatgctttaccgccctcaatagatatttcatatccaaaagcttcttcatcctgcttagactttaaattaactttacctacagatgctatagatggcagtgcttcgcctctgaatccaagagtatgtatattataaatatcttctgactcttgtatcttgcttgtagcatgcggaagaaatgctttcgctatatcatctttatagattccgtctccatcatctattattctaataagagaaattccaccttcttctatttcaatgattatgtttttagcatttgcatcaattgaattttcaatcagctctttgactactgacgctggtctttctacaacttctcctgctgcaattttatttgctgtgtcttcatttaatatatttattctcttcaagatgtcctttcctcctttcaatgcttatgggcgtaaaatgcaaatgataaaatcacttccaaataagccttcctaatgaacacatgaacttatttctaatacattgttattattacatacttgtttaatatattcaataatattgaaatactggcattggaatgatctgtaattcgaatatatctttttgactatgatttttattgtatactctaaatgattttagtatttctattaatatttccattagaacaatattatatttaatttacatataagtaacaatctaaatacaaaatatatttacaataaataatatttgccgataatatggttaagctaatattagaaattaaatattttctataaggaggctttaatatgaatgataaagatttttataattcaactaaaagtgtatctgatccagcatcacaaaattataataaggtagtaaaagaaaaagcacatcaagaaagtccatttggggaagctgagccttcttctcatactgaatttaaaaagaaaagacactaaaatcataaatccacgacaaaaattaaattatgtcgtggatttatgaactttaaattaaattatcatttttcaatagattatataatgtaggattaaaattaaattgaccaattaaattttcaacttctaataaagctttttcttttttatccttagatatattagacttagaggctctaatcaatatatttttaggagaatgtgcaatatcaataaattctaaaagttgtgttttgtatcctatgcattctaaaaggtttgctctaacagaatcagtcataagtgctgcaattctttcttgaactattccatactttgttaatatagacagtgaatctgttttcatctgggcgttaaattcatgctgacaacaagggacagagaatattaatttagcattccattttatagcattatataatgcgtaatcagtagcagtatcgcatgcatgtaatgttattaccatatcaactttattattatatttaaatccatttatatctccaagctcaaagtgtaaattttcatagttataactttgggctatatcattacatttttttataacatcggctttaagatctaatccgatcatctttactttaatattctttatttctacaaggtaataatacaatacaaaagttaagtaagattttccacaaccaaaatctaaaacagtaagttctttataatcatttttcttgatttcatcatcaataatttcaacaaaacgattaatttgcttgtatttatcatactttgagttcactacttttccttctttagtaaatacacctaaatctattaagggctcaataatcataccctcttttaatatataatttttttccttgttatgagctttattaagtgttttttgattatcactttttttcttacttaatagaaccttgcccttttttgatatttttacctcaaagctagccgaatttgaccatgcagaaatttgcttataattcggctccacatactcaataattctttcttccaaaatatctgtatcaatgttttcatggaacacctgcttatcagtatatttttctatttgatagtacgttcttttatcattttctttgagatatataactattttattatattcaaaatttttatttgttttattgctaataactagctttataacattgtcttctattatttctttaatcgctttttttaactcttccatacttcaactcaccttatattcaataatcttgtttactaacagtattaatatattagttttaaacctatttttatattttatattaatttcatctacaatactatgattatttatagataatttcaatattaggaatttattatttaggatgttctttcaattatattataccttttcttaataagtccttgaatgtaggccattctacaaattttccacccatactttccaaatgttttgtatgcatctgacaatctataaatatgaaattttcgttttttagtttttctgcaagctttattaatgctattttagatgcattacttaccttagaaaacatactctctccgaagaagcattttcctattttgacgccatataaaccacctactaattcattattaaggtatgtctccacgctcattgcataacctttattaaataaattcatatatgcttttttcatatcattattaatccaagttccctcattattatcttcccgaatatccttgcagttactaattacaccataaaaatctttgttgaaagttacatgaaacatatctttttttataattttcttcattgatttagaaattttaacttcatctggtattaatataaatcttggcttgggacaccaccaaagaatcggttcaccttcgttataccatggaaatataccattacaataagctaatatcagtctttctaatgataaatctcctccgattgccaaaagtccatctttttctgaaagctcaggattaggaaatattatctcatttgttagtctaaatatgggcatcatattcacttccttgtattttaattcttcttttaaaattattctatcatattctaatacttaaataattctttgcaaaaaaataagcttgtaaaagcttatttttttattataatcactctacttagatttattatttagttccttatataggttccccaaaagataattcattttatataaatttgtttggttatataaaattaaagtttaagataaactttaatgaatcaaagtgtttagactctatataaccaatatacggcctagtgtattattaaaaatacaaaatactttatgattataagattttataaaaatctaacattgattcctttaccaagaagttggacgcactattgactttggtaagattgtattagaatctcctttcgctgaattaatctgagattgcgtaatgaataagctatctttaagattagcacctctaatatctgcatcacgtaagtcagctccaataagatccgcataactcaaatcatttcctctaagatctgctgctatgagaaatgcccctcttagatccgcgcctttaagattaatctttttaagatctgcaccaatgcaatccaatctgccagcaattgtttttttacgttttaagttagttttactgttaccaagctctttggtcctaacaaattcgcttgtttgcctaagtagcgcattaacattatctctatggacctctatatctaaagtcataaggaggtcgggtgccgatttagtaatatcctctgttttggctattagattatttattttattttttatcttttcattagtttgaattgataaagcttgttttagataccacaacatttcatgaagctgtctcataatcaaaaaaacttcatacattttatcggataattcgggattttctctccaattatgtccagcatatgtaatttgagcaaccttttgtccagcaccaaaacaatcgtaagttgtacaacctttaagtcctttttttctcaaatctttatgaatagagcaaccaaaatctgattgcaaatttaagcaaggctttccagcgcttttattgtttggaaatccgtctgaagccgaaaaatataatgcaacaaaaaccaaagcatttttggcaattaatttttagatcttcaaataattcttcttcaaatgtattttcgtttatatatgtcaaagtaactcaccccgtaatattatatataacgcagtcataacttatagcaagtaatttagtattaaaatattgtattatgtatttaaaaacttatgttccaactgcatttagaattattttaacataattggaactattaaactactttaataggattagaaagtttttattttaattttttagcttcagcaactaacctatatagagtgttcatggcttccataggatttaaacttaatatatccacttcgctaacttcttttagaaatgcctctttttctataaaagtaaaatctaattgcatattgttagaagagtccttattcttatgttttttagatgaattttcagtcttttcatcaattctatgatcatctttattactttttgctttatcaaaagagtcttttgcttcaactttttctatatattcactcttactttcacaggctttttcagtaatagtaactacattattggcttgatttatatctacagcaacctcattttctatgatttcagtgtttgttactttgtgtatatcaaaattattttcgccttcaagtcctagaagaatttcttttgctctattaataacatcatcaggaagaccggcaagttttgcaacttctataccgtacgactcatccgcaccaccttcgactatctttcttaagaagattacgctatctttcattttcttaacagctacagagtaattcttaacaccaggcaaaactccttcaagttttactaattcatgatagtgtgttgcaaataaagttttacatcttaaattttcgttaccagttatgtattcaatgacagaccaagctatcgaaagtccatcataagttgatgttccacgcccaacttcatctaataatactagacttttagaagttgcattcttaagtatgtttgatacttcccacatttcaaccataaatgtggatttaccaccagccaaatcatcagaagcaccaattctagtgaatatcttatcgcaaattgaaatattagcgctagaagctggtacgaaagatcctatttgagccattaacgtaataagggcaacctgtctcatgtatgttgatttacctgccatgttaggtccagttattaatagtaattccttatcactttgattcaaggtagtattgttggaaacaaattcacctcttccaattaccttttcaacgactgggtgcctaccatctactatttcgataattccgtcttcattgatttcaggttttacataatcattttcaagagcaattaatgccaaggtggaaataccatctagattagaaattattctagcacttttttttagtcttgcaatttccttctcaattgaatctcttatatcagtgaataaagaatattctaagtttataagcttctcttctgcgcctagaattttatcttccataattttaagttcttctgttatatatctctcagcgtttgcaagagtttgctttcttacatacctaccttctggaatagaattataatttgattttgaaatttctatgtaatatccaaatactttgttataacctacctttaaagatttgattccggtaaattctctttcacgattttctagagctgcaatccattccttaccatgaagctttgactgtcttaattcatcaacttcagaattataaccatctttaattatatttccttcttttatacttaaagagggctcttctttaatggaggattcaagtaattctcttatgtctgatagttcatctaaattttcataatattcttttagcagttctgaattagcagttcctaaaagttcttttatagatggtaatttgtctaatgaagctttaagagataacatatcttttgcattcacatttttatttgaaattttaccgacaattctttctatatcataaatatcttttaaagaacttcttaaatcctcattaaaactaattgaactaaatgcttcgctaacaccacttagtcttttttctatttcagatttaataattaacggttcttcaatccattttctaattgttctaccacccatagatgtagcactcttatcaagtacccataaaagagacccttttttgcttttttctcttatactttcagtaagttctaaattccttcttgaatttccgtcgattgtcatgtaattaattatttcatattgttctagcaaatttatattagttaaactcattttttgagtttcatatatgtatttaagtagtactctacttgaaatttctctttcatttactaatccagaaacctctaaatccgaaaattgatctataatttcttcttttgatacgataaattcattaaagtctttctctgtaataagtgcagtagttataccctttatatcatctattaaagattggctaatgtttttatctactaaaatttctttaggtgcaacctttgaaatctcatctagtaaggttatcttaatattatcaaaggaagttgttttaaattcgccagtacttatatccgaaactgctaaacctattctttcatcactttcatatatagtcattaaatatgtattatcattttctagagaactattagcatctatgaatgttcctggtgtaattatttttacaacacctctttttacaattccttttgcttcctttggatcttcaagctgttcacatattgctaccttataccccttattaacaagtcttggtatatatgctgctgctgcatgatgtggtattccacacataggagctctttcctcaagaccacaattttttcctgtaagaactaattcaagttctcgagatacagttattgcatcatcaaagaacatttcgtaaaaatcacctaatctataaaatagaatacaatcactgtattcctcctttgttttcatatattcaaccatcattggcgttaaagccataattaatttcctcctttttatgtagctaggttacactatttctcgacctagatttatatatatttaatttaaggtaatatttatataaatttcattatacatctaaaaatccctagaacaattataacaattatcttagagattttcattaatattttatttaactgaaaatagatataaatatttatcttaaaaggatttttctaattttagtttttcttaaaattgtaattattaatgcagacaataataaagaacagataaacctaagaagtgtatttgcaaaaagtactggtataaacattgcaagccatatcataactatttgatgagaacaatatattcctaagctatattccctgcaggctttagaaatcttagtagaaatatttttggtggaattaattgcccaaattaagattaaaggggctgcaattattgatgatagatacatattagcgtccttagcaattccagttttatttaacacaaaggtttcaattaaaagtaatataattgaaagtatacttaataatcctgacttttgtatcttttcatttaatttatatttgctaacgattgcacctaaagatacaaaaagaattgattcagtaatgcctatttgtggaagcataaatattgaagtatatccgttgattaatggatttatcatagttttttcaaacaacccataataggtatctccagttgtcccaaatagatataatacaaatccaattataaacaagaaaaacagcttgtctctttttaataatggggaaattataaagatagtaataattagcgaagatatataccaaaggcttcctgtgacccctgcaaataataatctctcaataattaaaataggtggtgcacttaaactgcttaagacaagaggaaataacgctatgatctcaataagcacccataaaacatagatacgtaataaatgcttaatagttgatttaggctctttctcagaaccaattctattatataaaaagtaacccgaaaccataaagaaaaatggcacagcgagtctagcaatacccatactagtagcaatccataagtcatcatttatggatttgaaagccattgtatgaattgatacaactgcaattgcaaaaactaaacgtaataaatcaaccattccataatgaatatcattttttgattccatatcacaacactctccctgaatatattaatattttagagcagacacttagaatcttaaatgcctactcattaaaatcattataaattacatttgcatcagactgattgctcatttttttaacatcgctgcgtacttatataaatataatagtacaagcaataagccttagttacataaaacctctgaattatacacttttaaagctcaaacgtcacttaagctaaattagagaagataacatatctatattgatattttgcaaggaattcagtgttattttaaatttctgctattttatatctattcggaattataatcattttatctttgaaaagattttaaatcgtttaataatctatcaatacattcagacgataggttttttctgcaacgaaatacttcaatatataaataatattcttcttctgaacatattatttgtcgtatttgattagttctaattttctttataattactttttgatcatttctcaatgcttgcaaccctttaataaatacatcttttatatattgatatttaatttcaagatcttttgcttttgcatcatatgctgagcctctaagataagctaattgcgcaaattcataataggctttagttaaataaacagattcaaaatcgtcatatattatatatgcattttcttcattttttatcgaaccaaaaactctttccattgcagaataggttataatccatacatctcctgcttgttttatttcattttgctcaaattttcctctttcgatggcttttctaattgtagaaccatctgataatccccattttttagccgcctctgataaggtcataatagaagttaaatctttattgttaacttcatcatttacattatacaaggcttttatatctgttttttctaattcgccatgaaagaattttatttctttaccatattggtcgtattgtcttgcaataactaatatactttgttttttatataataaatcataaatgtcatctatttcaaagatacgattttttaattctttatcttcagcatgatatatagcagcagtatatagtcttttgttttctgtagttataatagaaatattcataatttatcacctcattttttattgtcactatcttgtgacattttcattatatacctttatttcaaaaaataccaatttcgaatttgccaattaatgaccaaaattaatcatatactaaaacaattctaatattttcgttatatagtgattattattcaaatatatctcccaatatcgtgacaacaaaaaatattaatataaaaatacaccaagttaaatccaagaaatctgaattcaacgtggtgcattttccttatatagtgacttagtataagatttttttatttgattttatataaacttaacaaatctccaataattaaaagtagctaataattttttcaaactttaagtgtctatcttactaaatttattactgttgctttaggtctagacatagattcaattgaatatcttattccttgagttcctattccagaagctttaactcctaggaatgggaaatggtctggacctctctctgttttattatttacttgtactgtacctacctctaatctgtcagctacataaaatgcatcatcaatattttctgtaaatactgcactttgaagtccgtattctgatttattcgctatctcaatagcttcatctttatcttttactcttattattggaagaactggtccaaaaggctcttcccatgcaagcctcatatcagtagtaacattatcaaaaagtgttgggtatattaaattaccttctctatttccaccaacaattagatctgcacctttatctttagcatcatctattaattccataacataatcagccgctttagtactaattaatggtacaatatctacatctttgtctaatggatttccgaccacaagtttattcattttctctttaactttagaaattaatttatcagcaactttttctaatactaaaattctttttactgcagtacatctttggccagagtatgagtaaccacctgctacaatattattggctgcaagctctaagtccgcatcttctaaaactatagcggcatcttttccacctaactccattaaaagtggtaccatgctagttagttttgaaattctaacaccaacgtctgtacttccagtgaaattaataaagtttacgcctttatgagtaactgcgtaatctcctatttcgcttcctctacctgtgattgtatttaatactccatttggtactcctgcttcttgaaaaacttttgctaagtataaaccacataagctaccttgagtagcaggttttaatactaatgagtttcctacaattattgcaggcgctatctttgatgctgataggtttattgggtaattaaatggagatattgcaagaactactcctaatggctctctatttacaactgagattttatttcttttaaatccagggaaagtatctcctggtatactttcaccagacatattcttagctgtatcagcagtgaatcttataaaatctgctgttctatgaatttcagactttgagctctttctgtctttaccaatttctctgaccataatatcaacaatttcatcagttctttcaactaaaatatcagcagctttatataaaatctcggctctttcactcattggaactttactccattttttttggccctcttttgcaatacttagtacattatcaacatcttcctttgtcatagcaggaactgtgccaattaatgaattatcaagtggcgaatagatttcaattactttgttatctttactaccaacccattcaccatttattaaatttttaaagttattattttcgcattttatacaattaaacattccttcacctctttaatacaatttactaattaatattaattatcatttaataatataatatactaattcttatattatatccagataaattaataaaatttaataattaatatatttttcttattgaaaatacagcttagtgttataaagtatggaatataaaaaattacttcttatgaattttatgaaaaatttaagattaaaattcatattaattaaaactttaagaatatctaatgccttttggtataaagcctatagaaaatagttattttaacctgttatctttagtaaaaaatgttctatatccaagggttacaaacaagacagtggacacagcggtactgcctaatatagcaagcattatgccaatttgatattttattgcagtgataggaaatgttccagaaagaatctgtcctgtcatcattcctggtagcgatacaattcccatagttagcatgttattcatagttggaagtatggcgctgtcgaaagcattattaacaatttgtctagtggcatcaagtgggcttgcaccaagcattaacgaattttctatttcaattcttttatcttcaaaatcactacatagtttatttgcacctagtgcaatacctgtcatgctgttaccaacaatcatacctgaaataggaataaaatattgaggattgaaccatgggcgaacactaagaacaactattataaagaaagctgcagtcaaaagagctccaaaggtcattgaaatagcaattatactttttaattcctttgacatttgaactttaactctttttattgaattataaattgcaaaagaaatcataattataatcataaaagaagttaaccaccaacttggattattaaatacgaacatgagaacatagcccattatagtaagttgtattgtcattctagttgaagcaatcaatatttgtttttctcttttgatacctcgtgatttaaaaataataagcattattagtacaaaaacataagcaattgaaagttggaagactgatagattcattactgcattattcataataagatttcacaacctctccattttcaatcctaactattgaattgttatatttctgcgctatttgctctgaatgagtgatcattataagttccttattgttttctaacacaaactttgaaaaattatctattataaattgttcagtatctttgtctagtgcagctgaaggctcgtctaacaaatatgtatcagcatccattaacattactctagctaggcatagtcgctgtttctctcctccagaaaggttaccacatccatcagtgagttttttattaagttccactctttcaagaatttctttcattctactctttgatacaggaagtttttttgaaaattccaatccaatttggagattgtcttctatattaccactgtaaataacaggagtttgacctagcataactacatttctacgtaataatattgtatcaattttagaaatatctttattattataaagtataactccttcatcgggtacgtttaaacggtttaacatacgaagtaaagttgtctttccactaccagaaggccctacaacacatgtaattggtttatctatattcagaaatttgatatctaatatatttctaaattttatatttctaatttcaaacatattaattcacttcctcattatatagcgtttgtaatcatttctgcacatatcattcaaattgattgatgacataaactttattatagataaaaaatcgcaggcgactgtggttaagttccgtattttgcttcgcactctttaagaataaaaaaaacttgtaacaattatatcaataattacaaggtttttcattaaatctatgaatttttaataagcccaatagctacacctaaaacgttaaattgttgatcctctataataattggctgatatttgtcgttctcaggtataagagcaattttcccatcaatgactttataagtcttaagcgttgcttcaccttcaatatcaacagcaacaatatccttaatacgtggcatattctgcttacttattactacataatctccatcataaatatttttatttatcatggaatcacctttaactttaagcataaaaacatcttttgaagttcttatccaatcctttggtaatgagtagctatcctcaatatattcattaattaaaattggattacccgctgcaatctcattaaatacaggaatatttactacgtcgtctactttttcttcaaaattgttataatctacatatatttcatctactgatcctgaatcttttataaatctatgagatatatttctctttaaatctatatattctatagaccctaatgtaagagatgaactttgtaataaattcttattagtctcatttttttgaatcaacttatcactgctatctacaaatccttctatctcttcaacttctatttctttgtaacattcattcaaagaaatacattttcctttcatatcatatcctaaactagaaaagtggcgtccctttacaagccaagcattaggaattgcagtttcaaaagtatccataataaatgttatactagaataagatttttcattatatagtgatttaaataattctaattgaactttcgtaagttgctgactattatctatgaatatatgggtataattaattattggagctttttttgcttcatttaaagctaaaagttccatgtcttgaacatctattttattaagcattcctaagttattagtatattcttctaaaacttcaaaaatggcttgtctttgtttggagtttcttctaagaattttagatatttcaatgtttaaattattaattctaccaactctattagcactttgatactcttcaagttttaaataattacatgatttaatccatttaatctcgtcttgtataaattcaatatgatctaaatttaatatatccggctttttcttttcgtatctttttgacactatatgtattgcatctttaagctcagcttcacgttcttcaaaagatgccaaagtaagatttatattattattttttacatatttatttaaataataagagactaaagaatctattgtccttatttctaatttatcactattatcttcatcaaagaagctattttgatgatatttttcaccttcaatatttctatagacagaataaaaataatcagaatatccttcgttacaagctgcgacaaggattttatcatccttagatatacagtaattattaagtagtgatggaatcttatgtataaatgaagtggtcttcccagacccttttggaccttttattaatagatgaccatttggcttattattaattatctttttttgttttttgccaaattccatatttctcccctccttttttcattgaatttcactttataaatcgaacatgaattcttaattattttgtaattatactatacttaatagctgtatgtaaagtttagagaagtaacgtaaatttgtttgtcaattgtcgaaaaatctttaattaaccggtcaaacattgtattaatcttataaaatagttataataaacaaagtaaaataaggcaatttaaatatggatatacaaacgaaaaaggaaggtgacataatggaatccaatattatattttttgatattgatggaacattatttaatgaaaagacttatacagtccctaacagtgctaaggcagctctaaaaaaagcacaagaaaatgggcatctaatcttcattaatacagggagaacaattataggaattgatgattgtgtcaaagaactaaattttgatggttatgtttgtggatgtggaacttacatagaatttaaaaataaagaaatactacatagaaatcttggaatagatttatcaaaagaaattgtagccaagcttcgcaaatataatatcgatgctatattagaaggtaagaatgacatttattacgatactaatatacattctaaagaagttcttagaatcaaagaacgtcacataagggaaggattttataaaggtaaaacttttgatgatactgaaattaactttgataaatttgtaatttggactaatgaaaatagtgattttgaaagctttcataatgagttcaaaagtttatttgaatttatccatcgtggtgaaggcttttatgaattagttcctttaggattctctaaagcatcaggtatagaatacttaataaattatttagatattcatcacgaaaacacatatgctattggtgatagtacaaatgatctatctatgcttaaatatgtaaaaaacagtattgctatgggaaatagtactccattattatttgacttagtatcatttgtcacaaaggatattgaggatgatggaattaaatatgctttaaaacactacaatattatatagaaaattatttatttttagttcctcctaaaagaaatgtataaaatagcctgtcgctaaatatacatagtagaagaaatcttttaggaggaaaatactaggattcaaaaaataaatttatattggtatataagcaaaaagcacctaataatataaaatttcatagtataatatgaaacctttaaaatttaaggagtagtaaaagtggaaaattcaattaaagctatttgcaatacttcaacatacttggataaatatcattcgaatacaaacttttcaagtaatgattcattactcgttgggtccataaacaataggtcactaggcaataatcgctatatttctttattaaactttcaactatctgaattacatcctaactctgtaaagaaagcatatttatatttgtttattcaagatattaaaccagattataagaattcctttagctttggtattttaggtaattatagcaatatagatatagctgctattgattggtcgagcttgcccaaaaaggattatacaaagttattaaatcatatagtacatggatataatataggacattatttaaaaattaatgttacttcattaattagatctctagcaacacataacgaaagctataatatatttttacttcctcaaaatcaggattctaattcaattattaaattatcttcattcgagtcaaaatatcctccatatttagatataataacatataatacagattcgacaaataatatagatttatcggaagaacttaatattgaaacttatattgaagaacctgttgaagagaatacttacgatgatgaggagactgagactaataattctgaggatatttctgcatcaaaggaatcttcaaatgttgaaagagatagtgtaaaggatcaagaagatgttacattaattaatcatttgcttaataaagttatggagatcttagtaaatcaagatttgaaactaaattctctgaactcttacagtgaatctttaggccaagaaataaacagcctatcaaacaaagttgcagatatcggtgataaaatatcttcattagatgaaaattctactaatttaaaacaaaatgatattgaaacgttaaatataaatatgtcatcattaaataatcagctattggaattaaaagctctattacctaatttaagtgtaaatattgagaatctaaaagagacaattaatgaatttactaagacagggaaacttgatttttctaatttgaactctataagctctcaattattagaagtatcgtcaaatttgaattcattaacgaaattaatttgttccataaaagctgagcccgtaaactagactacaataaaaaatcatttaatatgtattgtataattaaagttcttgttcaagtaatagtaaaattatttgagcaagaactttaattatgtgctctattattgattaacacttgtctatctttaacaaggctttttaaaggttcttgctcaaacatgtggtcttcattaggaatatagtttagagcctttttattaattatattatttatacatgtttttataatatttttgataatcaccagaggttacatttttcatccactctttattatctaaataccactttattgtttgttttattccaacttcaaaagcagtttctgggtaccaccccaattctttttttattttgtctggtgctatgccatatcttctatcatgtccttttctatcctcaacatattttattaagctttcacttacattcttatctacattttcgttaatataagaaataacggttttaacaatttgtatattagttctttcgttatgaccaccaatattatatatttctcctatcctgccattattaattaccatatcaatagcttttacatgatcttctacaaaaagccagtctcttatattcattccatctccatagacaggaagcctcttatgatttaaacaattatttattaataaaggaattaacttttctggaaattgaaaaggtccataattatttgagcaccttgttatatttataggcattttgtacgtatcataataagctttaactatcaaatctgcccctgctttacttgaagaatatggactatgaggatctaaaggggtagtctctttaaaaaagcctttagaacctaaggaaccataaacttcatctgttgatatttgaagaaatttaacgccttcctcaaatcctttttcagtttcccaagcattttttgcgcaattgaggatattaacagtaccaagtatatttgttttagcaaatacttcaggttcttttatacttctatcaacatgggattctgctgcaaaatggacaacataatttatatgatatttcttaaaaagcattgaaactaattctttatcacaaatatctccttcaacaaattcatatcttttatcattctctattgatttaagattttctaaattccctgcataagttaacttatctaaatttattatattaatatcttcgtatttatttagcatatataaaataaaatttgaccctataaatccagctccacctgtaactaaataagttttcatgactacaactccttcatttcacttgcctaatttacttataaacgcttctattgcatctttccaatctctcatttcatcgccaacagtatttcttaacatcgcattatcgagagacgaatatttaggcctttttgcctgagtcttatactcttcagacgtacaaggtcttacttcacattcttctccagataatttaacaattcttttagcaaattcataccatgtacactcgccattattggtacaatgatatattccataatcttctgtttctattagcttcaagatatgatatgctaaatcattagcataagtaggatttcccatttgatcatttacaacattaatatagtttttttctttagaaagtttcattatggtataaacaaaattacttcctacataaccataaagccacgctgttcttacaataaaatgctttgaacataatagctgtacatactgctctcctagaaatttagttttaccatatacactagatggtgaagctaaatcatattcttttaatggcttatgagtattttcgttaaacacataatcggtagaaacttgtactagtttagcgcctattgagtcacaagctatagcaagatttcttggtcctattgagttaactctaaacgcaaaatcttcatcaatttcgcatctatcaacattggtggctgcagcacagtttattactacctctggctttaaataactcagtacctctttaaccttgactaaatttgttatatctagcctatctacgtcaaagccaataacttcagatacttttatactctccgatatttctcctatatcagctcttccgatttttattatttcagtaatctctctacctaactgtccttttgctccagttattaatatcttcattataaaataagcacctcttttaactatatattataatctggatattaccttaaaaaatttcatttattcctacattacctttatcattttctgataaaattaccttaataactttctataaaagttatgcaacgtttaattggtatcattcctcttaattcattccctgtactaaagtgcataaaaatctgtacctttataattaaatatagcttcatcataaagtactaaaaatcaatatgaaaaatcttacggaatataaaataagctttattatataatgatatgtaaaaattagaggaatgctgcaaatatattcgttattattttcaattcttttgctctcctctaatattccatagattatagttattgtatataggtatggatatcatttcatctacaattgcttttgtagaaatcaaaacactaacttcaaacttcattttttcatttgcaacaactggattgcttgttattgtagcaaaagaatttactacaaactctactccttgttgttctgcataaaccggtatatataaccttgctttctgcattccttcaatctttccttctacaatatatttttcttcatccttacctttaaactccacgatatatggtatgtaaaaattatattgtaatattgaataatcttttcgagtatctacaatagttacattttttgtttcatttataacttcacattttttaaatttaatatattctaggtttataattgcatccttatttaagggtaatctaattgaaatttcagagaaaattattttttcttgataagtagatagcactttttttgcgattatagtaatactattttcctgttttaatttttcttctgaatctattaaattaggaaattcatcttgtacttgaagtttacttttagttactatcccaatatcatatggaagactattattttgttcaaaattaaatgtatcaataatagtattatttgaagtgtcaattctatcaattactcctctcccatcatcacttcgacttgttactaagagtatttttttatctggagataatcgaagcctttgtatttttggaagagtagtttttatatttgttatgcattctttctttagcaagtctataacttcaattctatgtaagccactattagctgcatacaaaaaagtttcattctgttctagagctgtaattatagaacctatttgtaggcttatatatgaaatatctccactttcaagattaagtatagagacatttcctttataatttcctttatttgctcctttgttagcgatatagatacatttctcatttttttctataataatatagtttggtaaaatgccaacttctttatatagattgattaaatgaaaatctgatgtatcatataccttaatttcattctgtaaaatatccaatacaaataatcttctcttggatttatcaagttccaagcaatttgctgctataaagcctttcaaagaaccaatcttttcactagtttctaaattataaatgcatacctcttccgtatcgcatgcatatatctttttattattggaatccacttttatattaccattattggggatattccatgttttatcagaattaaacaaatcatgaataagagtaactttattatttctatcactagctatatatatattgtttttttcgtctataactatattttgaggccttggaccgatttcaacttcttttataatgcgataagtatcaccatcaatgatagatactctacctgtgcctatatttgatacataataaatcatcttctctagtttatcaatcataagtttgctgtcaccccatcattttcttatattaaaatttatgctttgttcttcgttattatgcaacaaaaacatgaaaagacctggtttaaccagatcttattcaactaattcataagtttcattttttccttctcctaaaatcttatacattgcggttggataaatattattcttatataattctgtttgaacaatttccatgtctatgtctttgaatttgactgcctgagtgcagctaatattaattttattaggagcgctaactaattttgttttaatatttcttttagttaaatgctcatatatatatagtgctctctgatgacaagtaaataccattatataatcatacttttctgctttcatataaatcgcctctatctggtgttatcctaatattatttataagatatttctaccttattgtatgttctaaaattttagaagtgattctatattccacttggtttctttcttaataaacgttccataatagattgattcctttcaaattcaaggtcttcatataatttattcttttcttcatttattgtcatgactttctgtctaattattagattttcattttcaagttctaataattttttttctatacttatcctaatatctttttcttttagtaattgatcttttgcatcattcaactgtttttttgcatcatccagctgcttttttgtatcatcaaattccttttgaagattttgttgtaactctataaatacattataattctcatctgtcttacgtttttgttctaatattattgcaattctctcttcataatcatccatgaatctttgttttttttgcaattgcatatttaatgaatcaattttcctatccaaatttttcttttctaacttcactttagataattcgagttttaaattttgaatttcctcattttcattaaatgaaatttcattattaacttgattcgtctcatgtttcaatgaattattcatagtaaatctatttggaatatatagatttaaatccggttcatctgttccgtaagtctctagtaatttaacggaattatctctgttataatgcataaaacaatggtatctcattactgtaaattcattacctttatcaaaatatatagggctttcccattgctcattattaaaaaatgaataaaatatcttattttgttctatccaacaggcacataattcgttatttccaataaataatattggatcgattaatttcatattactttcacgaactctgtaaacttgtatattaccactaatatctatacaaacgtgatcaataaaatacaataaatcttctctagatttgtttaatatatgaacatcctgttgttggtcccttaacacttcaaaagatatatcatctccttgaatcccataaagtcttttagcagaagaccatttacgattttcaaagttacaatagtttagtgagacttcatctccttcatctgtgatgaaaaatacttcaagaccactttgttcatttgtgtttactaaataatattcctttaagttaggtaccaagacgatatcttgcagcgagaaaaatttcgtctcttttccattccaggcgcaatgcattaacacaccgtgatcactgccatcattgcttatgagcaaaaaaaatatatgcatttcttctccaataatttcaatctttaaatgctctatttgaaactcatcaaaatccatttgatatagagtttttccgacccaatgtttatccttcattgtgcaatatttcaattcacccttaatattgctgtatactatatgtattctctcatccccctcaacataaacagcaaaccccaatacttcattattaatcaaattttctttagtccattttccttcttcatacataattttataacacaattctctattatcatttcggaaaaatttccatatgttatcagtataatcaacatatatactattcatgccactccctccttaataaaattatatttttaatagaagtttattatgcttttttgtaaaacttattttaatttaacttttattatcaccagcataatgtaatttcatataatgtattgtaaatgttgaataaacttatgttcaataaactttttgaagaggaggaaaatatatgcccattaacttcaagaaattttcgccacgtcctggccttgtaaataaacaaggacatttaccagatccttctgaattagtttgcattgaagtaccaaagatttttgatcaatgcctaataaaaagatgtcttgtatatggcgatggtcctgacacaaatacaacagattctgaattaagaagcaatccactaacagatcctaaaagatatattggtagtagagattttaatttaacattaatttctgtggataagattccacttgcaggcagacctggcttcaaaaaaatagttatttcctatagaattactttctatgcagattatatagatgcaaatggtgtaaatcaaagcgaactgttcgaagttaatagaaccgatgtaataggaaaattttattgccctgaatctatagctcaaatttctgctagctttgttcctgttcaagatgcagctgatttggattctaatataataaaacttgaaatggttgctcaagctttggcaggtgaattattagaagatgaagaaggaaacgacgttttagatataactttaggttactatattgttgtaaaatgtgagcttattgttcaacttcttataccagcttatgattattgtcctgttccaaaagaaccatgtgaagaggaaccagaggaagacccatgcgagagatttgaaaaggctccaattcctaaattctatcctgatcaaaacttagagccattattctcagactgtgatgataatgatcaatagtattattaacaaaataattaacattataattccaaggattattagaatttctgtagataaatagatataggtcttttactaaaaatagatataaagatgtgatgatatccttttattgaattattatattcaattataaaattcaagtattatcatcaccttctttgataaagttcatatattatagtagaagaaccaaagaactctaaattatccatatagaaatttttataaaaatttatctaaattaaaaggaggattctatttatgaattcaatgtcaaaatgtcatgataatcatgataattgcaggaaagaaaaagatttatgtccaacaattataaaatgtagtcaagcaggttcagtaacagttccaccagctactgttttaggtactgcatttcctcttactgctcttactttagacacttcttgccttaaaaatccttgtgtaaagttagagtttgcaagtaatcttgttgctgcagttgcattcacaggaacaataaatttccaagtatttaaagtttgtagaaatcaatctactcctgttccagttggacctgcatacacttttaacttagtagcattattaagctcacaaacattatctttctttgtttgtgactgtggcgatttctgctgtgatgagtgttgcacttatacagtaactgcaactattactagtgctgttactgttggtactttaagtattaataatgcaactttaggtgcaatagcagcttgtggatcaagttcatgctgctaatagtaaaatctaaattgcttaagtctttagatttaaatattaatttggatattgaattgtattcaaaattttataaaatctaatataaattattctttaattagttgtaaaatctagaattaaaaatagtttaaactcgaggttaatgccttgagtttttctatataaaaaaataggaggaactatgaaaaaatattttactttatattggcctggacttcaaaattttcatcttacaaaagatgtaggtttaatcccttatgtctttcaaaagcatttaaattatgaggtttctattttatgtggcaaaaatgaagaacattatgatgaagtatttacaaaaaacattactcttaattttatggacgacgaagcttcagtgacatccttattgcaaaaaaccgatatccttatgtttattggcttatatgattttaatttaaatatgatagaaagatttaaatcagtaaatcccaatggcaagatttacttaaaactagatttaaatagatattggctaaatagaataacttttaatgatcgaagcattaatttgctaagtaataacagtttggtttccgtagaatcaaaaaatctaaaaaaaataattgatgatacctggccgataaaggttgagcatatacctaatggattttatgatttctttgatagtccattgataaattacaaggataaggaaaatatcatattaacagttggcaggctaggttcttatgaaaaagctactgaaattataatggaagcctttaaaatagcgtcagaaaaacttcctgactggaaattaaaattagtaggacccattgaaccaggctttaatgaatatattaataactacttgtataagtactatcctaagttacaaggcagagttatttttacaggccctatttatgatagaaagttactcatggaagaatacaagaagtcaaaagtattttgtttgacttcgcgggttgaggcttttgctcaagtatttggtgaagctgcttttaatggaaattatattatatcctctgatgtagagggcgcaatagatattacagatgataaaaaatatggagatatctttcaaataaataactttgaggaactttcaaagaaattgatttcaacatgctcaaacgaaaagctacttgaacaggtgtgcaatgatattcaaattaatacacgagataattttgagtggataaaaatctgcaaaaaaataaactctttcttttagaatatggcaaaattaagatattttaaactctatttttcacgctttttgctaattttcataaaatacaataaagcattagtatgatttttagtatggttgtttataaataaacaattactatattaatctattacaggagatattaaaataatgtttcaaaacaaaaaaacttcaataataatcctaacctataataatattaattataatcaaatatgccttgaaagtataagaaaatacactactttaggcacctatgaaataatcattgtagataacaattctagtgatggaactagagaatggcttaaagaacaaactgatattaaactcattttaaatgatgataatttgggttttccaaaaggctgcaatcttggaataaatgcagctgaaaaagataacgatattttagttctaaacaatgatacaaaagttacaccaagatggcttgataaccttaaagcctgtctatacagcaatgaaaaaattggtgctgtagcagcaattactaataattgttctaactatcaagcaataaatgttccatatacagatatagaagatatgatcgattttgcagacaaaaacaatatttctaattcagagatgtgggaagaaaaatccagattggtagccttctgcatgttaattaaaagagaagttattaataaagtcggaacctttgatgagcggtttactcctggaaattttgaagatgatgatttatgcatgagaattgtggatgctggatataaactcatggtttgtaatgatagtttcatacaccattttggaagcacatcttttaagagtgattatgctaaatttaataatattctaaaaacaaatgctcataagtttgaagaaaaatggggcttcaattctaattcagaaagtttattaaagtttgatattataaaccgtataaatgaaccaatagaaaaaaaattaaatattcttgaatttaattgtggtctggggtctaccctacttaaattaaaatatatatatcctaatgcaatgctgtatggtatagagccaaatagaaatgtagccaaaatatgtgaaaaaataatagaaacaatgactggggattttgaagaaaactatactatgaacttcaaagaaagcaaaactaacttttttgattatataattattgggaataaacttcaatttagtaaggatccatggaaattactaactgagttaaaaaaatatttaaagcctgatggatatataattgccacaataccaaatttaatgcattattctgttataaaaggtttattaaagggaacttttatctataatcacgattccatattaaatccaaagtgcacaaaatttttcacattaccagatatacaaaaaatattcgaggaatgtggatatataaatccatatatatttcattactctagagaaatatcacaagaagatgataattttttagatcaaatatgtgatattgttggaagtaatatgaaaggcttttttatatcctaccagtatgtagctaagtttcaaaacaatacttttatagatactcaaatctgaattcagacttatgtggtatcttaccgaaacaataaatatttctgtaaccccaagggtcataataattcggaagactatggaaacatagctgaaatccctaagttgcaagttgtatccaatttagcatgtcaccgctttttgcgttacaagctaaattggaaattttcacacaaattctatttctattttttcattttttttagtgttatatacctcgattatcatttgcttaaaatcttatgcataactcttccctctcattcagacacgcctctcttactttaattataatttatttcaggaatgtgtccataaaactatactagaatcaatacatagaaaaatatttatatagaaatatatatttataggtatctagttttatataaacatatttaaatatttaaatataaaaatataaaaatataaaaatatttataggaaacatgcgggtttgaagaacatgaggatttaaagcatttattttaagtatatttaatctaagaaaattatagattaaactgtccatatataacacttataaaataaaagtgataataataatatgaatattatagtcatttatcataattgtagcagctttaatgattcaacatatattatattagataactataataatagttaagtcatttgaaaacaaaagaaaattaaggagatgacaaaatgcctagtgtaattcttagtccaattgcggatgcatatatatcattgttaaatccaaacacgaactttggattctcaagtcttttatttacaggaagatttgttcagcctaatgacctatttagaagtttattaaaatttgatttaactggttctgttccatccggaagttctatagcaaatgcttctttaaatttatttgtttttagaaaagatcttcctgatgctgttttgtctccacagactgtcagcgtatttacaaatgcaagcgacttttctgaaaatacagttacgtggaataatgcaccggcaataaatccgacaatttattctataaatgtaactgatgcagatattggtatgtatataagtattgatataactaatttagtaatagattgggcaaacaacccagcaacaaattttggtgtaacattaactggtattgaaaatgtaattgatacaattataggttacttctcaaaagagtgggcagttgaaacacaaagaccattccttagcatagaattctcatctggaggaactggcgctactggtgctacaggtcctacaggccctactggacctactggacctactggtgccactggagaaactggacctgcaggaaatactggcagcgcagttactggcgccaccggacctacaggtgatactggtgtaaccggacctactggcgatactggtgtaactggacctacaggtgatactggcgttactggacctacaggtgatactggcgttacaggacctactggagacactggagcaacaggacctactggcgacactggagcaacaggacctactggcgatactggtgtaactggacctactggcgatactggagcaacaggacctacaggtgatactggcgttactggacctactggagacactggagcaacaggacctacaggagatactggtgtaaccggacctacaggcgatactggtgtaactggacctacaggtgatactggcgttactggacctacaggagatactggtgttactggacctacaggagatactggtgtaactggacctacaggtgatactggcgtaacaggacctacaggcgatactggtgtaactggacctacaggtgatactggcgttactggacctacaggtgatactggcgttacaggacctactggagacactggagcaacaggacctactggcgatactggtgtaacaggacctactggcgatactggtgttactggacctacaggtgatactggcgttacaggacctactggagacactggagcaacaggacctactggcgatactggtgtaactggacctactggcgatactggtgtaactggacctacaggtgatacaggtgatactggcgttactggacctacaggtgatactggcgttacaggacctactggagacactggagcaacaggacctactggcgatactggtgtaacaggacctactggcgatactggtgtaactggacctacaggtgatactggtgcaacaggacctacaggtgatactggcgttactggacctactggagacactggagcaacaggacctacaggagatactggtgtaacaggacctacaggcgatactggtgtaactggacctacaggtgatactggcgttacaggacctactggagacactggagcaacaggacctactggcgatactggtgtaactggacctacaggtgatactggtgcaacaggacctacaggtgatactggcgttactggacctactggagacactggagcaacaggacctacaggagatactggtgtaacaggacctactggcgatactggtgtaactggacctacaggtgatactggcgttacaggacctacaggcgatactggtgttactggacctacaggtgatactggtgtaactggacctacaggcgatactggtgtaactggacctacaggtgatactggcgttactggacctacaggcgatactggtgtaaccggacctacaggtgatactggtgtaaccggacctactggagatactggcgttactggacctacaggtgatactggtgtaaccggatctacaggtgatactggtgtaactggacctacaggtgatactggtgtaaccggacctacaggtgatactggtgtaacaggacctactggagacactggagcaacaggatctacaggtgatactggcgttactggacctactggtgatactggtgtaacaggacctacaggtgatactggtgtaacaggacctacaggtgatactggcgttactggacctactggagcaacaggtgcaggtctagctgctgatggctatgtatatgaacttgcaacaatagccgattcaactgttgttggtggtgcagacgttccattctctaacaatggaccgttaagtggtataactcacacaccaggtaccactactattaccgtagcaagtgctggcacttatgaaataaattatggtgtaagtataacagcaggtgttggtgcacaaattgcaattgctgtaaatggtactgttgatgcatctactcctataacagctttagttgctactggtgaattattcggaagcgctatattaactcttgctgccggagatgtcatcactttaagaaataactcagcaactcctttagtaatgacattggctccaggagttggctctcaattaaccattaaaaaattagattagaatataagattggccctctgctaaaatcagagggctttgatataaaatcaagtacatttttcatagcatttattatttatttaaagtttcagtatagagaaatattgatttttttatctattctatagtacataaaatttaaaatctgttccatttttatatacataattgcattatattgtgccaagactttacaattttccgtatattattagtgatgtatctttttttatctaggaaaaaataaagaaattaaggagatgacacaatgcctactgcaattcttgtccctattgcagatgcttatatatcattgttaaatccaaacacgaactttggattttcgagtcttttatttacagggagatttgttcagcctaatgacctatttagaagtttattaaaatttaatttaactgggtctcttccatccggaagtattataacaaatgcttccttaaatttattcgtttttagaaaagatttacctgatgctgttttatccccacaaaccgttagcgtatttacaaatgcaagcgatttttctgaagatacagttacgtggaataatgcgccagcaataaatccaacaatttattctacaaatgttactgatgcagatgtcggtatgtatataagtattaatataactaatttagtgattgattgggtaaataacccagcaacaaattttggtttaacattaactggtatcgaaaatataattgacactattataggatatttctcaaaagagtgggcagtcgaaactcaaagaccattccttagcatagaattttcatcaagtgcaacaggatctactggacctacaggtgacaccggagcaactggagctacaggtgatactggagtcacaggatctactggtgcgactggaattaccggacatactggagacacaggagtaaccggatctacaggtgacactggagtaaccggccctactggagacactggagttactggagctacaggtgatactggagtcacaggttctactggtgcgactggaattaccggtcctactggcgatactggagtaacaggtcctacaggcgacaccggagtaactggatctacaggtgatactggaataaccggacctactggcgatactggagttaccggacctaccggtgatactggagcaactggatctacaggagatactggaattaccggacctacaggcgacaccggagtaaccggatctacaggtgacactggagttacaggatctactggagagactggaattaccggccctactggagacactggagtaacaggacctactggtgatactggaataactggagctacaggagatactggagtcacaggacctacaggtgataccggaattaccggccctactggagacactggagtcacaggttctactggtgcgactggaataaccggacctactggagacacaggagtaactggagctacaggtgatactggagttaccggtcctactggcgatactggaataaccggccctactggagcaacaggaactacaggcgatactggagcaacaggatctactggagacacaggagtaactggagctacaggtgatactggagttaccggacctaccggtgatactggagcaacaggccctactggagacactggagtaaccggccctactggagtcacaggttctactggtgcgaccggaattaccggacctactggcgatactggagtaactggagctacaggtgatactggaataaccggacctactggcgatactggagtaacaggaactacaggtgatactggaattaccggtcctactggtgatactggagcaacaggccctacaggtgatactggaattaccggtcctactggcgatactggagcaacaggccctacaggtgacactggaataaccggtcctactggagacactggtgcaactggagttacaggtgatactggaattaccggacctaccggtgatactggagcaaccggacctactggtgataccggagtaacaggacctactggtgataccggagtaacaggatctactggtacgactggaattaccggagctacaggagatactggaataaccggacctactggagacactggagttaccggtcctactggcgatactggagtaacaggatctactggagacactggagtaactggagctacaggtgatactggaattaccggacctactggagacacaggagtaacagggcctactggtgatactggaataactggagctacaggagtaactggagctacaggtgatactggagttaccggacctactggcgatactggagttaccggacctactggagacacaggagtaactggagctacaggtgatactggagttaccggacctaccggtgatactggagcaacaggatctacaggtgataccggagcaaccggccctactggagacaccggagttactggacctacaggagatgctggaataaccggacctaccggcaacactggagtaactggagctacaggagatactggaattaccggtcctactggagacacaggagtaactggagctacaggtgatactggagttaccggacctaccggtgatactggagcaacaggatctacaggtgataccggagcaaccggtcctactggagacacaggagtaactggagctacaggtgatactggagttaccggacctactggcgatactggaattaccggacctaccggtgatactggagttaccggacctaccggtgatactggagcaactggatctacaggagatactggagtaactggatctacaggtgacactggagtcacaggttctactggtacgactggaattaccggagctacaggagatactggaataaccggacctactggagacactggagtaacaggatctactggagacacaggagtaactggagctacaggtgatactggagttaccggtgatactggagcaactggatctacaggagatactggagcaactggatctacaggagatactggagtaactggatctacaggtgacactggagtcacaggttctactggtgcgactggaattaccggccctactggaggcattggaattaccggacctacaggtgacactggagttacaggatctactggagagactggaattaccggccctactggagacacaggagtaacaggacctactggtgatactggaataactggagctacaggagctactggagtcacaggacctacaggtgatactggcgtaacaggacctactggcgatactggagtaacaggacctacaggtgacactggagttactggagctacaggtgatactggagtcacaggttctactggtgcgactggaataaccggacctacaggagataccggagtaacaggatctactggagacaccggagttactggacctacaggcgacacaggagttactggagctacaggtgatactggagttactggtcctactggcgatactggagtaacaggatctacaggtgatactggaattaccggccctactggagacactggagcaacaggaactacaggtgatactggaattaccggtcctactggcgatactggagcaacaggccctacaggtgacactggaataaccggtcctactggcgatactggagttaccggacctaccggtgatactggagcaactggatctacaggagatactggagtaactggatctacaggtgacactggagtcacaggttctactggtacgactggaattaccggagctacaggagatactggaataaccggacctactggagacactggagtaacaggatctactggagacacaggagtaactggagctacaggtgatactggagttaccggtgatactggagtcacaggacctacaggtgacactggaataaccggatctactggagacacaggagtcacaggacctacaggtgatactggcgtaacaggacctactggcgatactggagtaacaggacctacaggtgacactggagttactggagctacaggtgatactggagtcacaggttctactggtgcgactggaataaccggacctacaggagataccggagtaacaggatctactggagacaccggagttactggacctacaggcgacacaggagttactggagctacaggtgatactggagttactggtcctactggcgatactggagtaacaggatctacaggtgatactggaattaccggccctactggagacactggagcaacaggacctacaggtgatactggaattaccggacctaccggtgatactggagcaactggatctacaggtgacactggagtcacaggttctactggtacgactggaattaccggagctacaggagatactggaataaccggacctactggagacactggagtaacaggatctactggagacacaggagtaactggagctacaggagatactggaataaccggacctactggagacactggagtaacaggatctactggagacacaggagtaactggagctacaggtgatactggagttaccggtgatactggagtcacaggacctacaggtgacactggaataaccggatctactggagacacaggagtcacaggacctacaggtgatactggcgtaacaggacctactggcgatactggagtaacaggacctacaggtgacacaggagttactggagctacaggtgatactggagtcacaggttctactggtgcgactggaataaccggacctacaggagataccggagtaacaggatctactggagacaccggagttactggacctacaggcgacacaggagttactggagctacaggtgatactggagttactggtcctactggcgataccggagtaacaggatctacaggtgatactggaattaccggccctactggagacactggagcaacaggaactacaggtgatactggaattaccggtcctactggcgatactggagcaacaggccctacaggtgacactggaataaccggtcctactggcgatactggagttaccggacctaccggtgatactggagttaccggacctaccggtgatactggagcaactggatctacaggagatactggagtaactggatctacaggtgacactggagtcacaggttctactggtacgactggaattaccggagctacaggagatactggaataaccggacctactggagacactggagtaacaggatctactggagacacaggagtaactggagctacaggtgatactggagttaccggtgatactggagcaactggatctacaggagatactggagtaactggatctacaggtgacactggagtcacaggttctactggtgcgactggaattaccggccctactggaggcattggaattaccggacctacaggtgacactggagttacaggatctactggagagactggaattaccggccctactggagacacaggagtaacaggacctactggtgatactggcgtaacaggacctactggcgatactggagtaacaggacctacaggtgacactggagttactggagctacaggtgatactggagtcacaggttctactggtgcgactggaataaccggacctacaggagataccggagtaacaggatctactggagacaccggagttactggacctacaggcgacacaggagttactggagctacaggtgatactggagttactggtcctactggcgatactggagtaacaggatctacaggtgatactggaattaccggccctactggagacactggagcaacaggaactacaggtgatactggaattaccggtcctactggcgatactggagcaacaggccctacaggtgacactggaataaccggtcctactggcgatactggagttaccggacctaccggtgatactggagttaccggacctaccggtgataccggagcaaccggcgatactggacttactggacctacaggtgatactggagttaccggacctactggagacacaggagcaaccggacctactggtgataccggagtaacaggatctactggtacgactggaattaccggagctacaggagatactggaataaccggacctactggagacacaggagtaactggagctacaggtgatactggagttaccggacctactggcgatactggagcaacaggatctacaggtgataccggagcaacaggccctactggagacactggagttactggacctaccggtgatactggagcaactggatctacaggagatactggaattaccggccctactggagacacaggagtaacaggacctactggtgatactggaataactggagctacaggagttactggacctacaggcgacaccggagttactggagctacaggtgatactggagtcacaggttctactggtgcgactggaataaccggacctactggagacactggagttactggacctactggcgatactggagtaactggatctacaggtgacacaggagtaacaggatctactggagacacaggagcaacaggccctacaggtgataccggagtaacaggacctaccggcaacacaggagcaaccggaactacaggtgacactggaataaccggacctacaggcgacaccggagtaactggagtcacaggttctactggtgcgactggaataaccggatctactggtgcaaccggagctaccggaattacaggttccactggatctactggcgcaactggagctactggagttacaggttccactggatctactggtgcaaccggagctaccggaattacaggttccactggatctactggcgcaaccggagctaccggaattacaggttccactggatctactggtgcaaccggttctaccggagttacaggttctaccggatctactggcgcaaccggagctactggagttaccggtgtaactggacctactggcgcaccgcaactagccttcaccgatgctggcggtacacttgctgcttctattactattggcactgaaacctcagtagtaagtacaaatataagtacgacaactggtcagaatgttaaagttgattttgcagttggcattcaggtagttactactgcaaatttttccatagccttccaattaagactatacagtaatggtactttggttgcgtccagagaagttgagcgagtaatttcaagtgctggaactcagcgtttccctgttagtaacacttacgttgacacagcaacgacaacaggaacaacgacctatgacgtaagacttgtttttctaacagctactaatgtcgcttctgccactgcaattaatagatatttaaactgtatagctttctaatgattttttaatttttataaggatgctcttcttgagcatcctttcctctgtttgttttttaataaaacagaatcttttttccttttatatagaaatatattatttcacatatattaaagcaaggtagattaactactactgctgaccaaaaagtaaaattagactctttattagcaattcaatctgtatcaaaatatttttactaccatattatatagtgtaaaactttaaagaaggtggttatttgataactattagtctctgtatgatagttaaaaatgaagaagatgtaattgcaaactgcttggaatcagtaaaagatatagtcgatgaaatgataattgttgatactggctctgatgataagacaaaaaaaattgttaaaagatatacagataaaatttatgattttaaatggattgatgatttttctgccgcaagaaattttgcttttagtaaagctaccaaagattatattctttggttagatgctgatgatgttgtattgcctgaagatggcgagaaattcaaagatttaaaagaaactttagatcctactgttgattctgtaactgccaagtataatacagcatttgatgaatacggaaatgtcactgcaagttacaggcgtaatcgcctagttaagaggagtaataattttcaatggtttggcttcgttcatgaatatctagcagttgggggaaatataatcaatagtgaaattgcaataactcataggaagttaaaacaaactccaaaacgaaatctagaaatttatcagaataaattaaaagaaggagttgtatttacaccaagagatattctctactacggtaatgaattatatgaccatagaatgtttgatgaagcattgcaatactataataaatttttggattcaaagcaaggctggtttgaagataatatcagagtctgtgaaaaaatatgtgattattatcaatcaatagataaggtagaagatgggagaagatatgcatttaggagcttcgaatatgacactcctagagctgaagcttgctgtaaaataggcttttcttttttacatgaaaagaagtataagcagtcagctttttggtacgaacaggctacaaaactagaaaaaccaaaagacagctggggatttttcaatgatgcatgttggacatggttacctcatttacaactatgtgtttgctatgatagacttggagatcacaacttagcatatgagcataatgaaattgctgccaaatttaggcctaatgattcacgcatactatacaatagaaactattttaaaagtataggaattggttaaaaaagtacagagtatctttatgttactctgtacttttttattaaacttcaagtaacaatagcattatgaaattcataaaatatattaattttaaattgtctattataaataaaccgaatattttaaagaacctatttaatattataaatagctgctacagatgtaataaaaaaacaaatgaatttaagttattattgccaaattgaaaggtggcttatgattaatgcatgtccaaaaagttttaacaaatattacttgtaaagaatattgtacttctcataattataaatattctgttataaaagaagcacatcctcagaaaatatacttgccaaattatagtgataataccgaagagattgcgtctatagatagtaaatttcctgaaatttatacagctgaattatctaatgtaaatttaattggtgctaaccctataatttttgatgataaaaatttttgtatctatgatttagcatttaagaatcatgagaataaatttgattttagaggcaataacatttttgacatgagaaatcgtcaagcttttattggttatactgaatcatctaaaattattaaggaaggaataatgcttacttccagtacctcttctaattattcccactttcaaattgaagtagcttctaaattattacttgtaaatgaaatttccgaatataaccacattccaatattagttgatgcgatttgtcttactatacctcagttaaaagaagaattggaaatgttaaataagcaaggaagagagattatccctttaattagcggttatagttataaagtaaataaactaatatacgtttcggatttagcgatttatcccttaaatctaaaaccgggctttttagtaaaatatgaagatattatcattgatgatctggctattaaacctctaaataaaaatttatcaatgcaaaataataatcttcatagaaaattatatatttcaagaagaaaatctcccataccaaggttagaaaatcaaattgaagtggaaaatatttttaaatcctttggtttcgaaattatatttcctcaagatatgtcttttcatgatcaattgcagactttttctgaagcagaattcatagctggtgcatctggtgctggacttacaaatgtaatatttgcaaataaaaatgcaaatataatatttatacagccaaaaaacattcaatcaccatggtactcaactatagctggtatatctgaattaaaatactattttctagatggaggtctttcagggcactccaatatgccatattatcaaggtacttttatattaaatgaagaatatttaagaaattttctaaacactctcttaaaaactaactagataaactcttttattatattaatatgataaaagtagttttaagtaactaagctgttagggaaggtgcagtatcaaatggtaataaatataaatgaaaataaaatcgcatttattacgtgcgtagatgatgaagcttcatatgaaagaagtctatcgtatgttaataaacttccagtacctagtggtattgaaattgaaataatagccataagaaatgccaaaagtatagcttctgcatataatgaagcaattcaaaaaagtgactctaaatataaggtttatcttcatcaagatgtttatatacaaaatagcaattttataaatgaaatattaaatatatttaaaaaagattcaaatatagggcttattggtatggttggagcaaaaatcattccagtatcaggaatatggtgggaggattcaaaaaaagtaggaaaagtctacgacagtcatagtggaaccatggacttattaatttttaatgaaattaatgatttatattccgaagtaaaaggaatagatggatttatgatgataacacaatatgatcttctctggatagaagatatttttgatggatggcatttttatgatgcctcacagagcattgaatttataaaaaagggctttaaggtagtagttcctaatcaaaaatttccgtggtgcattcatgattgcggaattgtaaatacaacaaacggctttgaagaatatcgcaataagttcttggatacttactctaaagacatatttcctttagtcagcatattaattcctgcttacaatcagactaaatatctaaagtctgcacttgactccgcactaaaccaaacataccgaaatactgaaattattatatgtgatgatagtactaccaatgatgtacaagctttgattgaacaatatatgttaaaaaacaataaaattaagtattttaataatggcggtccacttggtcatagaggtaagcttaacgttaataagtgttttagagagtcatcaggtgaatatataaactatttattacacgatgatctttgggactttaataaaatagctaaaatgattgattattttctttatgatgataccctctctctagtaacaagttatagaaaaatgattgatgagaatggtaattattataacgataattttagaactgtctgtcaatattcttatgatactctcttaaccggagaagaagctgggaaaaaacttcttttatcaatgattaactatattggtgaactgactactgctatgtttaaaagaaaagccttggaatttgactgtgaaaaccataatttaatcgactatgataaataccaaatatactgtttaggtgatatatccttgtggcttaaattattgcaaaaaggaaatatgatgtatatttctgaacctttaagtaattttagaattcataattctcagagcattcaagataccactttagctttctgggcttcacttgatttttttaagctgattatttcttcatatgaagatggattttttcttaaagataaaagagagcttctacaaagtcttttagcatggtataaagaatataatggagacctcattagatttattgaacaatataataatgaagctgaaaataatgaagaagtaatgaaacttaaagatgaatatatacgttgttacactaaatttataaatatattattagagtaattgcatcatttactaaacttaagcttatatcaatcgaagtttaatataagatactatcaaataataaataacaagtccacttgcaaggctatttgggactcgttatttatttgatagtgccttacttcaatgttttgatataagcttaagtccaataattgtttaaattatttatattgataggtaattttatcttataaataaagtatatattgatcatatgccacagctgatgcaccgaaaccttccttttgatttattaatccttcatttagatatcttcccttgttttcatttgatataccaaaatcaaaatattctttgtcattataaatttcattaatcaacttatcaaaaataatatctaaagcacctattgctttaccctcttctgatgccgatatatattgaacatgaacattttccttattttcataaactactactccgcctaataaagtattatctttgtaagaacaaaacaactttatattattaggaaagatattagcaagacttttaatttcatttactgtatgaacaggtcttgattcatgcttttccatgagattctgctctaaaatcacccaatatttatcatagtcattagtttctaagacaattatattattttttaaggccttatttatctgtcttttccttctggtttcataatcattctttgtatttaattttattgaagatgaaatatttctaatatagagtttagcattatttataaataatgcatataaatcctcctgtgaaggaatttcatgataaatataaggaataggcttatataagattgttttaatatttttccctttacaaaaattaattagtaaattgaacatttctaacatagtagttgttttcattttcttatctaatataaagccaccataggttaacccgccatgactcataagctcattaccttctatatttgttggaagtatccctatcaaatttttcttattgtcgtaaaacataagagacatatcagtaaatctatctttatgataatccatatattctctcataataagaaatgtagcgtttttacttttccttacaaattcattccaaatgctttttttatcttcactatacacttctaaatacattaaataattactcctccaaaattgcatagccaaagcctgtcttaccatgcctatttccattataaaacatgtaagttttactattgaattttactatattaggataacaaatcatttctgaatcccagccactttccgatttttcaattcctgcttcttcatctagtcttgtccaatcaagtccattttttgatgttgcaaatccgattttatatggttcattggtgcttcttattgaataccacattttatacatatcattttcctttacaacccatggtcttccaaaaccatattcatattcattcttaaagcttatacatgtatgattttcactaatccattcaattccatcatatgaataggcatattttataacatatttaggataacttttatcatttactagaatccagtttatagcagaaacataccagcatttaaaaatattatcttctactattatgcttgttgcagaacgcagatacggttcttctttcgttctatcaagaacaggcaccttggagattttagtaaaattctccccatcctcgcttgtagctaaacctgcaaaaagcatataaggtactctttcacatctttgccacccataataatataaatattttttgttatccactgttaagatgcaggatggattaaccccagaatcgtcaaaggtcccaatatctcctatatctaagactggcttctcacttatattttttatattttttaagtttaacatgtccacatcaatatagccgattctaccatacatttctctatccagtgtggcaaaataaattcttatagtatcattacttataatatctgcagttgggatgagtgcatagctctgcatccactcaaattcacctttaggtgaaaatattaacccttgcttattccatttcataaaatcattcctttaaagaattctttgttctttcagataaaaattccacatcagatgctttaccttttacaattttgccactctcaatgtcttttaaaactaaaacacctgctccaacaatacagtcacttcctattttaatattatttattatcgttgcattaacccctataaaacaattatcgcctatattacaaaatccggatacaactgcatgagatgctacaaagcaattatctccaaaccttgaatgatggccaatatgatttccactccataaaacagtattattacccaattcaacaaatggctgcaccacgttgttttcaaatataaagcagtgttctcctatctttacatttttccatacaaaagcatgtgaactaatatatgaagctaatttatatcctttatctttgcattccttcattaatcttgtccttaatctatttaatttcttatagactgttgcaacaaaaacataatgattctctggattatacaatttttctatgtcttcaagaggaataactggtaatccaagcatttcttcatcttttaaataatctttttcaacagaaaaggctacaacctcataatcagaatcataagtaaaatattcatatgctatttgcgcaaatgcgctatcaccaataattattaattttttatttttatccatttatttatcctcctaaattaaggtcttataattaatatatcttctctcctgtttgccattggaagctttttatcctgaggaagtatataactgtcaaatcctgctagcctacacctttgaataattgacattacaaccgagtcatccatattttttgcctcaatattgttgaattttactataggttgctctttagtacctgtgaaattttgatgatactttataccttgatttgaagaaaaaaatctttttctttttgatatattagggatatctccaataagcattactcctaattcttttaaaagagtaagtgaggtatcaataaaattgaatatactttgttcagtaaatgcatattgaattacgctgtaagttataatacaatcaatttttcctatataattttgtataaatttttcacatgatttaggataatatccttttacttttaatacaaaatcatattccggcagatgattcagcatttcttctgaatcaatgagtattaacttatgcttatttgtcttgcagtattcaattagcattaaagttaagttactacaaccacatccaatatctaaaattgttttatttttttcatcttccattccaagcttagttattatgtcatcaaatataattttttccttattctgtctatattcaattggaaaaccaactttttcaatatcatttaatttatcattttgggctaattccttaaatttttcataactcaaatcctcaaatatatctgattttaagtccacattatacctctccttaaatatttatcatatattgcaaaaatgattcttcatcataatattaaatgtatttcaagaattttagtcgtgattgtgaattgcaacatatatatcatactttctaatttatgttttttatcaccattatagaccatccaataatcttttattaaaaatgctattaatataaaatcaaataaaaaaacaagtttatattctaaaatttgcttttaaatttattccatgtaagctttaagtacactttcttgctatcagcatagaatatatagatgagctaatttttttatgatatggagatgaataaatgtataattgttccatgtttaaatttttaagtataaatagcaactatggaaatctaacgcctattgaggaggtatttgatgttccttttgacataaaacgaatttattatattactaatgtcccacagggtgtatcaagaggttttcatgctcatagaagacttcatcaggtgctcatatgtataaacggctctgtaaaaataaaattaaaaaatcctaaggaagaatcagaagttatattaaacgactcatctgatggattatatattggtccttacgtttggagagaaatgtatgattttagtgaggatgcgattctcttagtacttgcatcggattattataatgaaaatgattatatacgaaatattgatttttatatgaatgaagctgcaactagatattaggaagtgattttatgaaaataccttttttaaaacttgaacgaatgcatgctgaaataagaaatgaaattttatctgctttcgaaaaaatatatgataaaaatatctttattttaggagatagtgtaactgcttttgaaagagaatttgctaaatactgcaatgtcgcccattgtataagttgtggaaatggattagatgcactttcaataattttacgaggatatgatattggagaaggtgatgaaattattgtaccttctaacacttacattgcaacttcacttgctgtttcttatgtcggtgctaaagtggttctggtagaacccgatattaaaacctttaatatagatgtaaataaaattgaagctgctattacttcaagaacgaaagcagttattgcagttcacttatatggtagaccggcagaaacagataaaataaaattattatgcgagaaatacaacttaaagctaattgaagatgctgctcaggctcatggtgctatatatggtggaaagaaggcaggcaatcttggtgatgcagctggttttagtttctatcccggaaaaaatttaggtgcattaggtgatggtggagctatcttaacaaatgatgatattttggctaagaaggtccaagctataagaaattatggatcaacaattaaatattataacgaatataaaggagttaattccaggctagatgaaatacaagccggatttttgagcataaagcttaagtatcttgataaatggaattttgataggcaaaagactgctaaactttatttagaaggaattaataataataaaataattcttccatatgtagactctgctcaagaatccatatggcatgtctttcctataagaacagaatttagagatgatctacaaagttatttgaaaactaatggaattggcactttaattcattatccagtacctattcatcttcaaaaagcctataaagatttaggatataaaccaggcgattttaaagtggcagaagatatatcaaataccgaattaagcttgcctttgtggtatggaatgaataaaaatgaaattaattatataatagatactttaaacaagtggtaaatatcgcgagaataaaatttttttctttagtaatatactagcaaatgctcaaaaggacctacatttttattttgtagatccttttatataaatacttaattattttctttatttaatttaccttttatttgttttgcgatttcatttgcagcaatcataccagtttgaagggcaccttgttgacttacatgcttttgtgatatatgctcccctgcaaaaaatactcgattttccatttcaggaaccgttacatcataagaaaacagtgttttgtcttcaggctttgataatgctcctgccgtccatatatactgtacatctgaccaaatcaatgatttgtaatcaattactttgtcatcaaggtaatgaggagtaaggccatgaactttttctatataccttattacatcatcaattaatagttctggactttcatttccaagtctcattgcttcctgacaccaagtataactagctaataatacgcctgcttcatttggagttactccaggttttaatacccatttaccatatttattaactacagctttagagtgatcagaaggatagtaaattgaagttaatggaagatcggtaaacgagcatcctcctattatcttttttgatgcatttcccatttcccaaaatctttccttaagaaatagatatatcttatgtgatgtctcattgttcatttcatttatagcttgtattttttttgttgtaaaaagaggttctatttcaattcttcttaagctagaaaatggtattgcacatattacataatcaaattcttcagatgtttttctattatctctattatctgtatatttaagtataattttatcttttgtagaatcattatatattccacaaatagggaatcccatttttatttcaattttccctaattgttctttactaatgccattataagcttcttcattcctatcacaaagcgcttcatataaagaatgaggtaagtttatcattccttcagtaatacgataattatattcaaaatctgctgtataatattgctgaagcatctcagtaagacttaaattaaaaaattgttctttacctcccaagcagccaagcattgttataaaatcctgactgacatccatattcttacacgcatttctataacttaatttatctatgtctattatactatctgagtattctgcttttacttgaattaattcccttcttacttctgtagggagcgatttcaaatatttttcatatatctttccataaaattcaaaccatatttgttttttctctgtttcactcagattaaatttagaatatatattattttctacactttttcctttagcatcatttactgctcgttcatttctaacatataacaaagcattatcattattatttacaaagggacttgtatgaagtttaaagagatttatataatgccaagtagtttcatgagatataggtatactcattggccctaattcaccataatattttttatttctatcaaaataatgggtgtatactcttcctcctatcctctgacttgcttcaaataaagtaatgttgcatcctgtctttctaagttcaaaggcagcagctaaaccagcttctccagcaccaattactgctacctttgtatctttagctattcctattggacaaatatttgttatctcttctggagggctcattaaatcaattatattctctagatcatctaatctattttgtaacttgagtatatattcaagcatggtatgtctttcgcactcaccaggattatctatttggtaaggagagtttgaattattataagaattcataactttcacatcctaatatctttattacatatataattatatatgtaccgcttctttagtctgatgttatcctgttttataaattctcattattgccactaatagtttttctatatcatcaaatgtattaaaatatccaggactaactcttactgtgccggcatattctgtaccaataagttcatgtattaatggtgcgcaatggtaacctgttcgtacagcaattccctcttcattcaattggtcaccaataatagaagcatcaattccatctatattgaatgaaattactgatcctcttctctttacagaatcacttccatagatctttatataagaaagttttttcagttcttccaataagtatgatattaattccttttcacatttttgtatgttatctattccaattcgattaatgaatttaataccttctccaagaccagcaataccaggtgtatttaatgttccactttcaaactgatctggcatgaagtctggttgaatcatgaaatgagaattgcttcctgttccaccttctttaaaattttttaattttattccttctcttataaataggccgcctgttccttgaggtcccaacaatcccttatgtcctgaaaaagccaataaatcaatattattttcttctacatcaattggaatggctccaacactttgagatgcgtctagcataaatataattccttttgactttaaaaggtttcctatgtttttgatatcttgaacactcccaagtacattggatacatgattaataatgaccatttttgtatttttatttatcacctctttaatatccctaatattaacataaccagctttatcagcacttactaatgttacttcaaccccattttcacttagagagtgcagtggccttaaaacggaattatgttcgatcactgtgcttataacatgatctcctttttctaaaactcctttaattcctatatttaaagcttctgttgcattgcttgtgaaaatcaaattaaatggactaggaatattaaataatttacatatttcttctcttgtttccataattttcgaagccgcttttatagccatgtcatatgaacttcttccaggattagcagcatagcttttcatacattttagtacttcattataaacttctgatggttttggaaatgacgtagccgcattatctaaataaatcatataaagctccttattaaatataagtgttataccaattcaattgttctaatagactctactaatatttaacacaataaattgtaatgaaattagactcaataataaaaaggatgattgaaattttagagtttactttatattaagtaatcatttgtataatgtaataatgcatagttctatacaaaatagaagaaacatctaaaagtaaaatttctaatttcgaaataataacaatcatccttgtagacaaagctcttacaaatgattctgaaaatcacaatttaattttctttaaaagaacttaaaaggtctattttctaatatttgttatagaacaaggtttaatagagctaaaagaaacttttagaagattatcatttaaaagaaatatttgctaattgttctcgtcagcattatcatcacaatctgggaacaatggctctaagttttgatcaggatagaacttaggaattggagctcgtacaaatttttcacatgggtcttcctctggttcttctttacatggttcttttggtactggacaataatcataagcaggaatgagaagttgtacaataagttcacattttacaacaatgtagtaacctaaagttatatctaaaacactgtcacaattttcatcttcaactatttcaccatttaaagcttgagcaaccatttcaagttttattatattagaatctaaatcttgtgcatctataactggtacataacttgcagaaatttgtgctacagaatcaggacaatagaacttaccaattacatccgttctattaatttcatataattcacttttgttcacaccattgcagtcaatataatctgcataaaaagaaataatgtaagaaatgactattttcttaaagccaggttttcctttaagtggaatcttatctaccgatattaattttacattgaagtctctacttccaatatatctctttggatctattagtggatcgcttcttaattcgcaatctgtagtatttgtatcaggaccttcgcagtatacaagacatctttttattaagcattgatcaaagattttaggtatttcaacgcaaactaactcagaaggatctggtaaacgtccttgtttatttacaataccaggacgtggtgagaattttttgaagttaatggacataaattttcctcctcttgaaagattatgataaatgtaaatttatttagtatttatagtacatcatatgtgtgaacataaaagtggtgacatttaaaaaaaatttttttcatttagttaataacattactcatataaaaataactatttaatcatctgatatagataaaagatatataacttagggctatgcagtggctttgagttaatatcttcactagaaattataaatattttttcagaataaaaatatttataatttcggtaagttcaaaaatgagtattattcttaaattacatatatatatcgcaatgcataatacacatttcacaattacgtctaaaattcttgcaatatttttagaattatcctgaagaattattttggcaatatatataagtttaaattatacctatttaaatcatatattataatctggatatttactcaagtctaactcacttaacattgaattagctttatccttttcagataaaatcacattttctatattttctaaaggccaattaacatttatatccggatcgttccacataattccgcattcatactcttttgcataataatctgtacatttataatttaatatagcttcattggaaattactaaaaaaccatgggcaaaaccttctggaacatagaactgtttcttgttttcttcacttaaaacgattccttcccagttaccataagttttggagccatttcttaaatcaacggccacatcaaaaacttcaccttttgttactcttataagcttaccttgactatgctctctttgaaaatgaagccctcttagaacccctttaactgacttagattcattatcttgaacaaaattcatattaaagccagctgcttcaaattgttttttattgtaattttccataaagtaacctctattgtccccaaaaactttaggctctattatataaaggccttttattttgctttcgtaaaaactgaaatttcccatattcacacctctaaatttgtaatacacttgttattatattcatgaacttcgccttcctctaccatatccattaaatattttccatatcctgtcttcattaatgatttagcaagttctataactttttctgatgttatccagccttttctataagcaatttcttcaagacacgctatatatattccttgggtattctgaattgcatcaacgaaattagatgcttgaagcatagatgaatgtgttcctgtgtctagccaagccattcctcttcctagtagatcaactttcaattttccttcattcatataggctttatttagatctgttatttctagttctcctctggcagaaggttctaactctttagcctttttgactactgtattatcataaaaatagagacctggtacagcatattttgattttggattttctggtttttcttctaatgaaatgactttgccgttagcatcaaattcaaccactccaaaggcctttggattttgaacatagtaaccaaatatatatgctccactatctagattagccgctttcattaaatgttctgaaaagctttgtccatagaaaatattatctccaagtatcattgctacattatcattaccaataaacttttcaccgataatgaatgcctctgcaaggccattgggtttttcttgaatagcataatcaatatttaatcctaattcttttccatcattaaataattctctaaaattttttatatctcttggagttgatataattaaaatgtctttaattcccgaaagcattaatactgacattggataataaatcattggtttgtcatatattggcaccatttgtttagatatcgattttgtcactggatagagacgagtcccagaaccgcctgctaaaataattcctttcattttaatcccccataatattctgattaattgtctaacttcagaataaattcgtttattaattatgttatgaaaaagtatattatatagttactttctaaaatcataaaatttaagttgtcattaatgcaatatcccccatttgtaacaaaatatagtacaaatcatactatgtaatagcatggcatacaatgctatgtttgtttataaagggggttaaaaaaattgtgggatacgatgatttttttgatgagaatatagataacaaaagaaaatattcttctattgataaaaaaaatgacgatagatatgacttagaatgcttaatgggattaatagattttgataactgtaagagaggacctcaagggccacaaggaccacaaggtgctcaaggcgcacaaggagctcaaggcgcacaaggagctcaaggcgcacaaggagcacaaggagctcaaggcgcacaaggagctcaaggcgctcaaggaccacaaggtactcaaggtactcaaggtgcacaaggaccacgaggattccaaggaccacaaggatctcaaggatctcaaggtgctcagggagctcaaggattccaaggaccacaaggtactcaaggtgctcaaggatctcaaggtgcacaaggtgctcaaggagcacaaggagttcagggagctcaaggtgcacaaggagctcaaggatctcaaggtgcacaaggatctcaaggtgcacaaggtgctcaaggattccaaggacctcaaggtactcaaggatctcaaggtgctcaaggtgctcaaggattccaaggaccacaaggtgctcagggagctcaaggtgctcaaggatcacaaggtgctcaaggagcacaaggcgcacaaggcgctcaaggtgctcaaggattccaaggaccacaaggagcacaaggagttcaaggtgctcagggagctcaaggtgctcaaggatcacaaggtgctcaaggattccaaggaccacaaggagcacaaggagttcaaggtgctcagggagctcaaggtgatcaaggatctcaaggtgctcaaggattccaaggaccacaaggtactcaaggacctcaaggtgctcaaggcgcacaaggacctcaaggatcacaaggagttcagggagctcaaggtactcaaggagctcaaggatcacaaggacttcaaggtactcaaggtgctcaaggaccacaaggtggacagggattgcaaggaacccaagggccacgaggattccaaggcgcacaaggaccacagggatcacaaggtgctcaaggaccacaaggtggacaaggattacaaggaactcagggacctcaaggattccaaggagctcaaggaccacagggatcacaaggtgctcaaggattccaaggacctcaaggtgctcagggtgctcaaggatcacaaggagctcaaggaccacaaggtactcaaggacctcaaggacctcaaggtggacaaggattacaaggaactcagggacctcaaggattccaaggagctcaaggacctcaaggaactcaaggacctcaaggattccaaggtgctcaaggacctcaaggctcgagagtaattaatatttatcttagttcacaacaatcaattcctaataattatttctttggaataggtatagactcgattgatttccaagcaagcagtgtagttgtacctcaaaacgctacaattactgggctaatttttagtattaggaatgagcctttggatttaaatcaatctgtaagtgcagagatatatagaagcacaaattgtggtgttaattctacagcaacaggaatcatagcaacagtaacaggaccaaatcctacaaattgttgtgcatctgtccctgctaatttatctgtaaatcaatgcgatttattaagtgttagaatttctagagttggtaacactgctgatttaattaacggagttacagctactattatattaactttaccataaatatcaaagtcctaattaattaaaaatagagtgttgataataaaatcaacactctattcttaattgtttaatttagggacaaaaaacaatgtactaagtagtaagtagctctgctaattttgcagataattttattattctggaattacaaccaatttctcgttgcatgaggagcaaaattttgcgtacttaatacatgtttccagcgaatccgttggttccataggccaccaacgaattgatcccataggtgccttagaagcaaaaagctcaatttcctcaggaatacgcccgacaaccaatacctcaatatctttaaagttagtttctaatcctttttttagtgtatctatcaattttttatttacatttacaggagatgagtatggaattggaaagattattgaaagtttattagaattctcatcaattatattcgctgattttaaagctaagtctccttcttccctctcccatacacgattatatgatataaattcctgtaatccaagctcttcaactcttttgtgaattctctcactgtaatatttatacagttctcctattaaaatttgaatctgtttgtttctggtaaaagttgaattatctccattttcatttctatattgtatatatagcaaatcaggaatacatatatattttgtgcaaagaaatgttcgaactaatatatcgtaatcatctgcaactaatagttcttctctatgccctccaagcatgtgatagcactctttggtccatgcccgaggatgatttggtaatccagctaaatgaagtatggttgttccatttattactgtatttcttaatacattttgccatctgtgcatttcatgaacccagactcgataatatacaccatatccatatccacaatcccatccataccaatttgaaatattgcttccgacatatggttcagtgcaatctccatatacaaatccacaatcaggatgacgtttaaatgcagctacaattttttctaagcaatcatgtgtcaattcatcatcatgatctacttctaataagatctcaccagtgcatataccagcagcatagcgttttgtggcacctatataaccattgcggtgatcttgcctatatcttcttacacgcggatcatccagaattagtaagtcctgattgtaagtggtatcattatcaccagaatcgtctacaattatccattcccaatttgagtaggtttgattcagaagtgagttatatacgcgtttaatcttatccttagatttatatgcggctgtaaaaattgatactaatggaacatcagaagaaaacttagtaattggtatttttttattttctggaaggagatctgtacattttagccagcaatagaataaatgagatggttgaatatcctttattgaatcataatgtagccagcgttttctttcatgatatggtaatgcatatagtgttgtaaactggtctgcatcgcctcctattgaaacatatacacgtggggctttagggtttatttttaaggttgtattttctactttgtataattcaacttttattccactttcaataatttctttcaacattttttcaagttcatctaatgaaatttttctatcaacaaacatatggactgttaataatggaacatcattaaagtgcatttttatcctccttttatttattaagttaaacttgccaagatcttttgtgaatttatagatatccaacgtatatttagacttatgttaatcaaacaaaattcaatacatttttattaagacatctattttaaatgatttgtttccagattatataataattactacttgcttttatcaatgtaaagggattctgttatattattttgcttaagaattcaattaattatataatattatatttttatgaataagttacagcatcgttgtatttcttattaatattaaacacaaaaatagtctatgtatattttattaggataatcttttataattatctttcataaagtacacagactattcaattgcgttattataataataatcgcatgatattcttatataagaaaagtcatataattatattagatatttctgaagcgtatatacttaattgtatttttacagttattatttgtagcagattgagcctagtgtaaacactacaacaaattcaattttatctccacatttatttatagccttaaaatgtaagatatcagatggataaccacaattaagcaacttttttagattgtgttttggcataaatattatacctgaactaactactttataatatcctaggcgtccacaaataaaaacttcatcacaaatacattttttattgcagccagtgtatattatttcaagtgtatcgcagtttgaagaacatattgcactagctgtgaaatattgtaatttgtttggataaacataaattattttattttcatttccaatgctagcttctagattacaatttattttcattactggagcttcacacttattatcacatgatttatcagtttctttttcttcaataatctctttttcttcaatacccataattttcctcctagaatttagagtataactgtttatttctataaattgtttttcctaatttcatcactttatttataactgttatattttattatataaacaatttttttaattgttacacttaatcaatctactttgttataaactgctcattagattttaataatttaatttaaatttaggttttttaacaataacgtctacataaattacacgagaatattgcaacaaaatcataagactcatgactacacttatctgtggctgtgaaatgtaagatatctttttttttaggatctaatttggaataagtttcagctataatcccagagtgcactattttatatactgcaagatttccacgaattccattatttgaagaacatccattatatctaatagttacatctccacaacattttgatacatcaactgtaaaaaattgagattcgcctggaattaaataaagcattttatttattgtatcgaaatccacttttagattacaactagcataaatcttaggttcgcttccttggcaacaattgtcgtgttttttatttttctctttctcccaattttctacattttctttttcgttcaaacaatagtcacattctatatcaaaaaaatcatcagttacaaaattctcgtcattacatatttttttagattcatttttattgtatgtctctttttcattatccattctacttcctccaattactggtattaataatttagcttattctttagaaatttataataaagtaaaatctgtggacacttataaaaaaggatacttaattaggttctgtacagaaagagaataaaaaatatacacctattaaaagagcacgaagtgcaattaatatcaattcgcctattaaaagagcattaaggcaattaaagacttactgcatgcagtcgcctgcgatttttttatattctcttatataataatgtattaaatattattagaaatggtacaaaaggtaatataaaaacataatatgtattaaaataaaactttttattacattgtagactaaattaattttaaatttatagaattaatatttagtagcgatttattttctttagtgaaaggaagtgggattttgaaggataacgaaactaaaaaagaaaattatgaatttaatgtacatccttgtaacttcaaagttaatattaaagaaataaagcctttttatgtacactcacgaaattatatttttttagacttacaagtattagattgttatagtgctaaaagccgtttaaggataaaatcatgtcctcacaatggtaagctatattcagttgaaccctctattcttgtatataagccaacagctggattttgtggttatgatttaatacaagtactgattgaagatgagtttggtggaagacatatagaaaatatcataattcgtgtaataaattaaagagtgagattttaaattaatctcactctttaactacaaagatataaataaaattttattcatttgattcataattagttatttcttttattgtattatcatcattcataaaaacaacggaaggcttatattttctagcttcatcctcattcatttgtgcgtaagctattataataactttatcaccaggttgtactaaccttgctgcagcaccatttaaacaaataactcctgattcccttttacccggaatcacatatgtttcaagtcttgcaccattatttatatcaactatttgaactttttcgttttctaagatacctgctgcttccattaatgttttgtctattgtaatgcttcctacataatttaattctgcctgagtaactgtagctctgtgtatttttccttttaacattgtaagtatcattaaaatttcctcctgaaaatctgtttatttatctgttcataataatcaaattagtatatattccttttcggtatcttcatagatactctcattaaattgaacttatcttttgaagtatattccatatcagaaatgaaggtcatgcttttgtggaagcgttacattagaggatttagctgtagatatttctttagtggaagttgttccatttttgcttatcctgaactcgtttcaggatcatgcagaaatggtgcaactcctgctattagaaattcacagcttaatcctcagtaacctgaacaaatgcatgatctttatttcggtggattttacgcataagtacattttcacctcaaatatctatattattatatttcaaatgtaaaattatctattaatcttgtttttcctatataaactgcaattggaatcaatacatttctctcaatgatttcaacgctttttagtgaatcactatctacgatttctacataatctatttttgctaatggttctgaatttagtacctcttttatcgagttcttaatattattagcatttctttcaccttttcttaaggcatctttagctatttctaaacttctacttaatactaatgctgcttttctttcatctttagaaagataagtattccttgaactttttgctagtccgtcttcttcacggattatagggcaagcaactatttctacatcaatatttaaatctctaaccattctttttataacagccacttgttgagcatctttttctccaaaataagctttatccggagtaactatatttaaaaattttgaaacaactaaacatactccatcgaaatgccctggtcttttagcaccgcaaagtacacttgtaagacccgatacactaacacttgtagatttatctccataatacatttcacttggttctggattgaacactattgctgcgcctgcattaatacaaagttccaaatctttatttatgtttcttgggtaactatcaaaatcttcatttggaccaaattgtgttggatttacaaatacgcttacaacgaccttatcattttcttcaacagctctttttataagactctcatgaccttcatgcaaagctcccattgttggaacataccctacagaaagcccctctctcttccatgccttaatcaagcttctaagctctttaatctctttaactaacattactgatcccccttctcatcctaatactaaaatttaggttcattatcacataagtataaacttacagttgaatatctatatagatactacaatcttaaactatacttagatcatgaaatatcttccaaacagaaatgagtaatatacttttgtggaatgtttcattggcaattttgatggatgtgattctttggctataagttgttacaaatgtgctagctcaaaaagtgagaatcgaaattttatatttcgttcttcgaactttctctgtgagcgcttgtctttgatgctagcactttgggtgcaactttatagccttagaatcacccctcataattgcctaggaactggaacaaaagtatattattaatttcgtgagttatcgcataaatctaagatttagtacaatttctttaattcattttcatctattttaaaagtgtgtttttcttctgggaaatctccagcttgtacttctttaacataagagctaatggcctctctcataacgttacctacatttgcatattgttttacgaattttggcacaaagtcattaaacatgcctaacatatcttgataaactaaaatttgaccatcgcaatattttccggctcctattcctatcgttggaattgaaactgcatttgttataagctctgcaactttttctggaattccctcaagaacaattgaaaatgctcctgctttctcaataagtacagcatcatctataagctgttttgccgctgattcactcttcccttgaactttaaatcctccaaaagcatttactgattgaggagttaatcctatgtgtcccataactggtatttgagcatctacaatagctttaatttgggctgcaacattcgcaccaccctcaagcttaacagcattagctccaccttcttttattaatcttcctgcatttaaaactgcttgttcgatagatacatgatatgataaaaaaggcatatcacttacaataagagcatttttagcacccttcttaacagcttttgtatgataaatgatttcatccatagtaacagctaatgtatcgtcttcacctttaataaccatgccaagagaatctccaattaaaatcccgttaacaccactttcatcaatgatttttgccattgagtaatcatatgctgtaagcatacttaatcttcttttctcttcttttgcttgtttaaaagttaatactgtatttttcactaatttacgcctcctaaaaacttataaatttccaaatgcttttttgaattacttaatacattttctatttgactcttatttttcatgtcatagaaacattcttctatgttttctgtaatatctgccttatttttatctctcaaagccacaagttttaatagattaaaagataatatcttatataaatctttatctttgtcctctaaaacagaaatatgcttctcaattgttgtaatatctccccttgctataggacctgttaaagaattaacaaacccttttgcataaatactatcaatgttaccctttattaaaggttttaaagcatttaaagcttcttcatcatctagtccaagtttttttaaataactcgttcctatatcaagcaaagataatgctaagttagatacaaaaacgctagctaaatgatatgttgaggaatcttctgcttttctaacaaagtacttatttccaataagcttaagtacactaataatagatgaatcttctaaaatatcaccttcaattgaaaaatatatatcttccaattcttttaagtttgtttctttactagagaatgcaaatattggatgtagagaataaatcattgcaccagaatgtttcgcattacataatacatttgatttgagtgaaccacttgtgtggcaaatagatttgttatttagatcaaattttgataattcaatatctataattgaaatgatgtcatcaggagttgtaataaataatatatcactatctttaataatatcttgaatgttgttataaaatttagattttgtaatatttgctgcatctatggcatttaagtcatcttttccataaaagccgcttaattctatccctttatgagtaaagtagcgtcctaaactcacgcctaccttccctgggccaataaatccaattttaatggtatcacctccatatacgtgtgagtgatacaacatcctaatttcaatctcattcattatagatatgagttgtattatatataattaatgctaaaaaatttggtgtaactctttttcgatactacccactgatattctaccactatgttttgattttaacaatgataaatttttttattctttaggaatttatattcctgtaaaatctatgggtaacttaaaaaaggttgattggatagtttgagtatttaaaaaagaataaaaagaaaatcttattcgcctgccaaatttttctcacatgcattcgaaaaggcagatgcgtgaaaaaaatctcctgctccacagtcgcccgcgatttttttatttaaatacaaaaaaagcaagattactttttaattcttgctttctcgtatttttataaaagcttacataatttcctctattgtaattacattttcaaggctgtgaagctttaaaatgtactctgaatgattaattttttcaggtaatgttaaagtcattctaagcccaattatatgattgtcaagctctttcgctttcttaagttccagattagaaatttttgttccatctaattttattgcattcataaagttcgtaacgcctgctatatgcttgagttcagcatatacatccaattcgttagacttagccctataatgtaaatctgctttatgaagtactgttaatacacctaataagaaaaagcatgaaataatagcgccttcataaaaaccaattccaatggcaagtcccatacatgcgcaggcccaaagaccagctgcagttgtaaggcctttaacttcattacgcccaactacgataatagtacccgctcctaagaatccaataccacttataacttgaatttgggcgatattttaacgtattttcttatattttattctatcttgatgctagacataatcagactttaagcacaattggtattttattgtaacttattatatcttagtgataagggaaaatgcaagggaaaaatttaataataaaacaatataacttggtaaaatttggtggtgctattaaaataaattggaaattttcttgattttcacaacttgaattttttaaatgtttcttgtccaaatttaaaaaagctccttaattcaaaataacccaatgtagtccgaatcgctaagaagagtggtatgtcttattagttgtaatgtatattaatcaattcttattcaacattgaaaaatccaacctaattttaattaagtgtcgctaactctgcaaactttaacataaattttctcttcttgcttaaaaattatatatataacatctataattaaaaatataggtataatcatcataacattccaaattctcatcatactttgatgtatcttgctcatattttctttgcttatagattgcatcatcttagacatagatccatatccgttattttgcattgtatcaatatcatattttcataatctgtttcacttatgttagccattaactctttcatagaattaaaatctctattttccatagcctttgcttcattatatattactcctttaattatattatctttatgcattgattttattgcttaagtatggaagaagtatgaagatagcacatttctgatagatttttatattcacaactaataaaaggttcaagtgctgtttttttatcaatacttgaaccttttgaatattacattttttcacttcagcatatttataataattgataaaatctttatgctacacaaactatcttatcccacatctgcattttattgatatctttcttccttcttcgtaaacataaccattaaagtatttgcacttctcacaattttttatatcttcaagtcttaaatcatggtcttccagtggagatcttggtcatttgtagaccataccgctccatgcccctcccatttttgtccattttattttctttaatatatctctgaaaatattaagagtttggggatttacttgatacttatattgagctataactttactatgagtctttttatctatttggtacttatgtggaactggattaattaatatattatttgtcgctaattcttcaagaaacgttgtgattgcatttgatacattcatacaattttgcaagtgattttttaaattgcttaagtcttgtttagaattatatgtattgtcgaaccaaaattcaatatcatcaacggttacttcttttttatattttttattaatgaatttatcccacactattaatctccaataagtttttatagtgtaatatctaaatatgaataaatcctttttagagcttttaagtatatcaaggaagattgtttatatctaccttatattttaattgcaatctttcaagttccaattcttcaaatgatcgtttttcagttcttttgataacttttctttgcgtttttttagctgaaagcctatcattaatactctttattttactctcttccaacctattaaaaatccatcttttattatcagtattgttaataatcttattggccaattcctctttgcttaactgaaatatttcatctttgtccaaatatatttcaactgtagaaatattacttttaattattttattctttttctcttcatctactttatgtgttactgcaacctcaattattaatggaacatcatttttaaaaattattatatcaggtttaaaatcaaaatttgacagatatttttctaattctattttataaaaataatgctctattcatatctagaaacaataaccgagttactactaaaactatataaaatattgtgaaaatatattatttcttctggacttgattcaaaatgtgtatcaacacataaattacgtctgacttcccaaatactaatacttctggaccagttcctccccctgcattaatatgaatctcaacataaagttttatatattttgtatttgctatttcattagcttgatctgctctttcatagcaatcttcacagctatagctattactcttatcaattctaagtaagttgactccataacctttctgcttcaaatactctgcaactaaagctcctatggctctggtacaattgctctcatcaagcctgtcaacaaccccacatccaatattaccactagcagtatgacctacagctattataaaatttatcattttacacatcccccctacaatctttaatttttttatatttacatataagttatatgtaatctagccatatatactctatatagaggtaaattaaatacaaaacacaatatatgtaaaataattactttaattcataactcttatattgaagatggaggtttatatggattttgattatgtcgaaactttagttaccagatgtaaggataatgatgaagaagcaaaagaaaaattagcttatgagtttaagcctttaatttataatatctctaaaagaactttcattgatgggtataatgcccatgatattatccaggaatgctaccattcactttttaaatctgtttcaaggtacagttcagaaaagcatagattcgttgcctatgctactaatgctattaaaaataatatgaatgatttaataaaaagaactaaaaccagaagatctactgagggtagtgatacattaggattacatgatgatgtagaaaatgattttccagaacttgaaatctcaactgaaacttcattatgtgaactgtgtgactatgaggatttaaaattagcccttaagaatttaaatgaagaggaacttgaacttatagattttgtattctacaaaaattacactgtaaaagaatatgcttatttaaaaaatatgtgttactctactgctattcaaagaaagaaaaacatattaatgaaaatccttaataatatttcattgtattattaaagagaaacgtctaacagctctaaggttaatccttggagctgttatctttatataatacaaatatttcatttacctattcaaaactaaaattgttaacaacctctgtagttttctctatataactatcagcaactttatctattccatcacaaatatatttcaagctacatccttggcatttatctaatatcccttcctctaacaaagaacattttaaatcatcctgaaaggtagaatttctaattgctaaagctatttgctttttatcaaaaacctctccttcttccgaattaagtttaatctcatctctaatcatttttacaacacactccaataatttatctacagctttaaaatttaataactgctattattgatatatgttttataccgtaacataacattaaaatcatgattaaatttgtatttctactctcctaatccgcatgttacaagcaaattctaatattcttaagttctaatattcttaagttctaaaaaatatatattcctaaattctttagaattttagaatctctaataaataaccatatatcttttacgaggatacataaaaatactgctaaggagggtatataatttatggctagaagaaaaacatcaaaggttcctaaaaatgattttgaatatgatgaaggtgaagtatatggatttactagcgaagctcctatagctggtgactgcatttcttcattctcttttgatgatgattttaatactgatactattcaaactaattctaaatgtagttctaatagtggcagtgctattcaagaatctcatatatctaatgctcaagttaatactgcttcagatactggtagcaacgttcaaaatgaaataactaactccacagaaatgaaaaacactttaaattctacgaaatacatctttgataatagaaggactcctcttcctaatggtgccactcctgctattgatggggaaactccaagtatcaaaagaagctacacccttagaagctctaccataagaaaaataaatgaattaaagagcatacatccagatattaatgtatgtgtcagtacaatagttgatattgctataaattattatcataatcacattgcaaacgaaggcggaacacagtaatttaatttattttctattctaatttcagataattatttattttctaaatatgaactaatatattttatttcatatatcccttataggaggtgatggatttatggaagtaaatgaattaattaaccttattgttaacaatgggtttcccgtggcagtgtctgcatatttgctaatacgcttagagaaacaaattgttagcttagcaagttcaattaataagttaaataccataatatcagctaaacttggtgttgctattgatacagagagttctactgatgattctcataaagtggcatgagtaaaaaggcgataaacattgattattagtgtttatcgcctttaaatttatttgtattagaacaccgaaactaagtagtttaatttgaatttaaattataaaatgatacaaagtttacaagaacacaaagagctcaactataaattggaatttatcttttagttaattatagcatattttgcaaatataatagtattgaattttcaagaacaatattttcattaattgctacattatttgattaagacgttttagtatataaaatactagaaaaagtttctagatatactaatacaatgatgagtgtgatttttcattgttatttatggctgtaataataaaaggggaaaccttcattatatgtgaaaatatgatattcccatacgtgaatgtggcaaatatttaacattaatattttctcctactctaaaatcatatgatggctgattaaaaaaagtaatagttatatcttcatttttaatattatcatgcatagtaagttctgtttccattgttgttctatactttaaatttgtacgtttcaattcggctgatacaactgggccattaatctcgctataagatctcgttatcattgtatatatatccatgtctaaaggtaatgctaaatttataaaaatcaagccaaatcctagggcgaatccaataaaagctataattcctatggccttttgatctatgtcagtattaaatagtattaatatacttaaaattaatgcagctataaggaaagttaggatagatgcataattagtcattataaaataaagccaatactttgttacatttccaacaaaataagtagctactgcacatgtacaaactaaaagagtaattataataaaactatatgatataatttttgattttcctaattttcttatattttttttcatacttttactccaaatctaaattattatctcataattataacttattttattatatcaggtagagtatatatttcctaataaatggatagattgtaatttttgaagaagagctcggaagactgcttatgtaaacaattggttttaatgatgcttatgaaaatttctatataaatgagtagcatgcatattacccctatgtatgttactatttgttatacttgcattgtttttaggttgtacatcattaaatagaagaacgtatcaacggttgataggccttttaagtataaccactccttaaataattttcattttaattttgtaaatatgatctattctcccaatgcaaatttattatttgtaagatttagtttaaagtttgaaaactaaatattatactcagaatgtgctattttttcttaagtatcagatgatgaaaagaggcaactgctttaaattcatctctttcacaaacattctgctccatggcaatcatttgtttctgccatttttcatctttttgtatatcttgattttgttgtaaatcccaaaatgttctcattcctaatattttttctatttcaaaatcatttgaccactttagaatttccatatcatcatagtagtgaatatctccaaacttttctgtctttccattctttccttctaataattcattagcatgctcaaaattatttaataaaacaaccatctgcataattcttcctactctattatgtttcaatatagaaagcactccatctttttttagaatccttgcaaattccttagcaatgtcttctctttgtagagcatattcaaaaacattatgacataatataacatcaaatgattcatcttcaaattctttcagagcctgcatatctccatgtatttgagtatagtcattatccgtaattctttctgaaagcattttattatctggttcaattgcaacaacttcattgtcccttgcaaaatgtgaagctgttattcccattccacttccaaaatccaatatttttttattatgtataaaacttaactgattccatgttatttgcttttgcaataattcccatactggaatacttgtactatccatttgtatcttcccccacaaattataatttaccttttggttaattataacacatttgaatatatactattgtctaactaaatcttaatctatcattatactgacacaataatacactataataaagttataagattgataaaactttttttcataaatatttaccctattataaagaagcaacattcatattcccctatgaaatgttgctttttctttatgttctatacttttaaattattattcttattaaaaaaggaatatattaatatacttcaagcaaaagaaaatctatgtattaaagaatttcatttaatataactcttacctctcctatattcttttcagcttgaactaattaatatcttcttattatgctcgttacactcgtaagttaatgtttttctcatccatcctgcttactttagattcacttttaaactttaagtccagaaagagtcaatccttaataccaatacgctctgctctattggcattacattgacactttcttcatcaatttctctaagtgtagaggcaggattaaaggctaagccttaaatcccataaagtaattctctcaaaatcaaaccgcaattgataaaattgtttaacccaatctgggtagttcaaatactccattttcatacaaatttgctttaatgtcctttttcctacccttctatcaagaacagcaagaacttttataatataattatctgattcaagcgcatcttgaattgataaatgaaaaaacttctgaacagcttcaagaaaatccatatcataatatgtacaatttttatcccagtctgattttaaagtatcttcagcttctttataggagctagcaagattatttctagtaatctgtgaaactgcatattcctgtctatacatttcaatccaagaaaagcaaactagttcttttccttcaagccttatagctgcccttccataagcatcatgcactttatgataacgagtgagaaaatatgttattctatttttcaaaggatcacacagtgattcttccaaccttccttttattcccgaccatgatttataatgttccaaccccaaaatctcctcgctatatttaaaattttcgcttagtaaattataacatatttactaatatcatagtattttgtgcatcaaatctacaaactattttcactaatctagatattattctaaattttaatcaacaaggcaccgtcaatgtgcatgcttttctgcctgtcatttttagtaatgagtgccattgaagcgcaagaaaccgaatcactaaaaataatttcttctttaatattttttctattatttttagtaattggatttctgtagcggaaatagggccattactaataggactagcaggtaagcatgtacattgtggacctgccctcaccttccaattatgctttctatggttcataggatttgaggcgcagcctttaatcctatcactgcatctaaattaactgctgaagaaagtgtcaatgtaattccagttgagcaaagctccttggtattacgtattgactctttctggagttaaaattcagaagtaaatttaaataatcgtcataagaaaattaaaacattatctttctcttcccattctcacgttttacaaaaaaactttatctgcgcatgcaatattatctcaattagcacaatacactacaaaccatcgtaacaccttctacttcatctgcagcaagaaactctaatacagcaaagaaggcatgtacatttagctaaataacgtttcccgaagtgtccctgctgaaattaagaaataaaccttaattttttaaaatctttataaacacaaaaatacataaaaattcatgacctttaatattttagcttgggcattctcgggacaacgacttatttagcgaagtgtgcctgccttcttgcgcccatcgggtacccaaataaaggactagtctaatgcataatagctcttagtatataggaggttgaagcttgccataaaactccgatatgcttagagacatatgctaatgacctgtccttttttgggtgatggataaagcgccgaaataatttcttatattattatcttatactatagttaataagtatatagtagtaactaattacttacgtagaaaaataacaaaaactatggagtggtgcagcctcaaaggagcacgcagtgctccttaataaatgtattccttgctgccgcaggccataaaaacaacaagaagtgcaagctataatactatacttttaggtaacatatacaatggtaatgtaacttactcaaaaatacctagcggtcttattatagcttgcacttcttttcatttgtctgatcataagcgagttaaaattaaggtaataggctagaatctgcagctgggcctatacaatatcaacatacgtttatataaatattgtaggaataataacaagattgtctattacttccttataaagcagttgatacatatgataactggcttaatcctatgaaaaacagcatttacactaataagtttatattcatatgtttttttacttttagaaaacttctacttaggtagttcatctacatattttttcaactgtccaaactccaccggaatataattccatcgttctacactaacacacgctgactgttctgtaacagttggatacatatcagttccatgaacatgcccatacaaatagaaaaatggagttgaagaattaatatactgtggaggctgatgctgcattactataaactcgttatagataattgaatatttatatacttcctcaaacccgcattccatccattcccttaaggttagatagctatcatgattacccataatgagtatctttttaccgttcaactgcttaataatttcctgcattttcaataatggataggaaccaacatctccaagatgaaataccacatcatcttcatgcactacgctattccataatgtaatcatcttctcatccatatcttcaacacttgaaaatggacggttttcatatgttataatatttgtatctccaaaatgcgtatccgctatcataaacgtttctgacatattataaacctcactaaaaacaatttaatatattttacaatatatatattctttattttttaaaacctatgattttcattttttacttgaatatgtttattaagtatttatattattttgggtgtattttaagattaacataatttaaaaagtttcctctttcttctgttgaaataaaagcttctttaggtatccaaatgactgactgtgtatttattaaaatatagatatattcatcagtttcttctactttctttatctcttcatactcgatctccaattgctttgctgctcttgtccaaatcaatttatcatcattaaaaacaatgttaacatctgcgtcaacatatttttcggaattttttcctccaattcttttaagcgagcttctacctatcgtctctgcaaaatcaaatcctattttatttagaataaaaaatcctatcataactcctaatgtcattattaatgctgtaaatgcaaaacttaataaactaatgttaacatggtttgttcttccagacaataaaataccactgtgaaaagcaataacacatgctactacttctataataagaataattttaattatttttctaacttccaattttcgttctttggtattccttatgtcaaaaatatacatatcagcatctttacaatatttctttttttctctaaattctatttccatttttatattccccactcatagcataaacttttttaacccttagcttttacttgttttacaaacattatttttattcattataattcattttgtgtttatataattctctcattttatgtgtttctatatctgccaatctagtaggtattggaatatgactctctttagttaccaaactctttataactttagttgatgtttctaaatctatatgattaccaatagatataaaaataggttttatatccttatgtgttcttaatactctcccataaatttcgccatttattgttatatctgtatatgagccttctatgttttcaggcatttcgaaatctgtattatctattttataataacttttagcaacaccaattgtaggcttatttaaatatattcctgcatgagtagctattcccatatgacgaggatgcaagtatccatttccatcaaatacatataaatcaggatttacttgcaactttttaaccgcttctaacaccaatggaagttctctaaatgcaagacatcctggaatatatggaaaaacaatcttcccactgtactcagctttttcaataatttcttttgtcttataatcaaccactacagcacagcaaacagcatattctatatcttccttgttccaatacgccaaatctattccagcaatatatctaatattagcgcaatttaatttttctatgttaattttactcattaatgattcttgaattttatagcatgatttttcatctaagttttcagtattcattttcacaatttcacctttatactttttcaatatttatttttatatactaaatattattatttttttctctactctctcgaattttcatatgttttaattcagtagctgtcggctcttttttttcttctattaatcgtcctgctatattatattttctatacttaattcgaatacccaatctattctcgccctcttcaataagtatattttcttcattccacatcttgtatactccatctgctacactatctttcttatacactacacttcgtacatttccattcaaatggaaatgtacatgttctccatctatatatccatctctataataagcatatccactaatttgattttcactaacactttcataaactagtcctgtataacctttttcagattctggttcaattaatttatctgtaaacatttctgattctaatttatcgtaatcaataccattctctattacatatttcatatctaaaattttatttttcattaagtaaatcctccaatctaactggcatttgtttttcacttactaacatatcaggatttatagttgctccatccgtaatatactgacaatgtatacaacgtggcataggcattcccggttcaggtagtgtttttttataaacttttaaattttgtactgaaatataatatatgctttccaattacttatgccttgacgcaaaatatcatgaactatttacagaataacacactgtatttacttgtctaaatataatatttctaactctgttaaaatattttctattttgcaatcataaaatcctgatccattcaaattattaaattctacaattttataacaatcattaacataagctatatccattacacatgagttattggggatccatatattgattattgactcagcaaattttaataattctatatttttatcattgttcaatgtaaataatttattatccattttatataaagtagcacttattacttttttatcaataataaaacatctatattctttttctatatttttaataggctttgaaattaatatttcaatatttttatcagctagcttacaaatttctgataatgagaacacaccaccagtaaattcttttgtatctgtaattggccttacgaacatttcttgtttgatatttaaattagttaacttggaactatttatgattaatccattattattcaataaatggtcatttaagtaattttcccaagctctgaaatcaaaattatcattaagaaatgaccctatcttccatcctgatttacatgctaatttagataacatcgttcccccaaatacaaaaatatcatttcttccattaagagaaatatataaattattttccgtaaaatctacgtacggtgtaacataataatattctaagtcctttttctttattgcttcaattagattttgttcatttctattactataaaaatttgattgaattaaatataacatgctcttcctttcacaatttccataatcaatttttttctttgttattgttttgaatctaaaaaaggctaacatataactaaatacttaatattagtcactatttcttcacactagattatacgaaaatattttatttccaatctatacttgtatattttttttagagttctaaaaaatacttctcattttataatttagattctaataatcttactatttcattttgaccttttttatgagctaaagttaatgcatccatgtttctcataaatggattgttgtatttaatctttgtatctatcactttttcacttagtaattttgcaatatctacatatacttcatatatcaccctaaataatggattattccgaggatttcttacattcatttgaacaccgtatgatattaaatatttaacaatttcaatttttccttctgatactgcaatataaagccaattactataatctatgatcatatttactttctctggatcagaaccaattaacgcaacgatattttttaaatttactttcgtaatgttattgtgaatataataatatctttaattaatgagagtgtgcactcattcgcaatattacctctttcattatctaatctacagtaattaatatcataatacccatttactttttcgagaacaatagtccttcgttaaaattatttaactttgacttctattgctacaccattttatatacattccaatcacttctgcctttaaagcaaaatatcatgattacccataatagttatctttttcccgttcaacttcttaataatccaacgcattttcaataatagatacatctattgttaagcttaattatagtgtttaacgtcttatttcttttcattagttataatatccccgctatgtaactgccctacattaatattggccaaaagaataccaaccgcatatcctgctggtgctatattaatactaccctccactggattttcaattttcataaccttagattgtagcctgtttcctttggcatctataatatccacatcatcaccaactctgatatctgcaccttctactacaccagctgctatgcatcctacatttctaattacaaatatatctctaatataaacagtataaatactagatttatcttgtgattgtgagtctgatttatttaaacaactaatcttacatacctcctcgcttccgatactttaaactcttctttcatttgcaaatttttcatttattaatccttccttataaagttactttaaacaacttaaagtaattttatatatcaagggtaacaccaaaacaggcattaatcattatacaaatggtttactatttatcgtactctttagaaatattcttcatttttatatttagaacgctgaaattccttgcctgccttataatctttccaatttaaaaaaccgcctttatattcacccaaaagtccattccataaattatcagaatccttagcccacattccttgactaataaaaaacttacccgactcagatatgcatatattatattctcctctatacaatctaaatactggaattgttctctctccaacttcttcatcataatttgtattatatttacataaataattaatagcctcaagacatgttgaatgttcctcgtaatcctcttctccaaatgaatctatatatttaggtataatattcaactctccaaactcttctagaaattttcttgcagcatcaaatacttcatatcctgcactttcaagtattttaacataatctgttatatctatttttcgattttcaaaccatcctgctcttactaatatttcttttacgtttgcctcaaacatattatttcaccatttttcctttctattttttctttcctatattatttaaatctttggttgtttttttacaattattgcatggtggagcatattccccattatcagttcttacacatttgaaatttatatcatcaaatttagcaccatttaagattgcttttctaatgctccatacttctgcacaattctctacattccaatcctgatacgatggctgttgggttatttgactaaaacgtccatctaattcagcttgtcttttagtctcagtaatagaatctaaaaactatccaactaaacttcttgctttctcaagttcttttaagatttcttctttttctgactcctcaaatcttgaaatcttctcttctaagccatactctattaatttaaaaaactctttatactttaaataggatagttcttctggataaccagcaaattccatgcttagtacaacttcatccatctcacattgttcaggatcactatcttcataggtgctataagtggctatcatacaaacgtcatcaaaaacaacctcctcttttgttaaaattacatctatgcatttcattattcttgatttattaatgaaaatccctttaataaaatttttattccattcattatccataatctttttttcattcataaacattctcctaactatatatatattaatcaaagcttgttactggatggaaattggtaacttctccatttctaaaatatcccataaatttcattccatttgatgcttcaccacaaatcaagtatccatctaaatatccattctccattgcttccaagccccactgatacatttgttcatcactataaattgtaggattatagactgttttaggttcttttattatcttatattcatctaaaaatccattttttccatcgcctttaggtattttatattctatagtctttagcccttgaaaatccttgtcatatacaatattctcagtgcttatcatcttatctatatttttgcctgttgactctagtttattataaaattcaaattcattatgtgttcctgtaactccctttttaccactaatcggtttattttcagcaattaggtgtgtttttgcattagacgaaattgtatgtggaatttcactcattggttttcctaacttccagctaactttacccgctccatcatttagcaacaacggattattcccaacaatcatagcttcattactagtcatattagaattaaaattcatcgttggtggattaatattttgtactcctggtaaattgcttgttgtaggtacaagttcaccactttcactttctaaaagattgcttgattttgaaactcccataactccaaatccaccatttttactttgatataagaagcctttgccaccattatttataacattattaaatgcagtttctccttcttctcctgctacatcttttcctattgaaaatccataagtattatttgatcctttaaaaacacctataaaattactatagcctcaaagaaaggcgtttactgtatgtctctaagattaaagtaatatgtgataaaagagtcaatacgtaaagcatctacgtattgactctttccaaatttaaagttgaaaaattaattaaaactatgttattacttacccaaatagactcgttttatcgcttctctttcttctacactaagtttaatattcattattgatatcaaagagtttattaacttttcaaattcatgtacgattacaatataattatagaaaaccgatactgcattagagaatgtacgcccattcacaatattaattctttcatcatttaatccacagtaattaatatcataatatccatttactttttctagaacaatagctccttttttaaaattattcaaattgaagaactttttatcatattcttttactaaaattgatgaaatattatctgagtttgactctgtgcattgagtaagttcatatttgatttttgaatttccttttggacgttcaaaaatttttttaactaaaatatacaaaccacagattgctatatcataatttccaaattcacagatttcaaaactttcacctcgttgcacctcatacaatgtccaatcattcatatgattcttcatttttacataattctcttgatctactccataattagttatgtgataaatctccactaattcgtgctcgtcattaactacataatctttacctaacaaattcgctaatttttttatcattttatcaaaccttccttaactaaatcagttacatcttcaagataaccttcatctattaattcatctattgaatatagcttgccattttcatgatacttaataaactgtcttgctcctcctctgcttccaaaccatggtgctgccttaccagaagttacttcaacactttgcgaaaccttataaaaataatgattggcagtctcactatgcggtgctaatgctcttgtatcatatagatctgttgctggtgcaaaaaagtttccatatgattctccatatctatctactaacataccttcatctaaaacctcagttccaggaaattcttcagcaaatccattatttattggccaattaagatttccattagcttgattataatataattcattattatatacatccttatattttaaatataaccaatcatctggcggatacttccaaccacttatctttagtcgttcagtatttgatatagtttctttagatgtccattcaacattactttcaccataaacttctttaaaataattattccactcttctccacctatacaatacttattagatgttcctggatcagcaaatggattattagcaataatattttcttcctcacttaatgtattaggaagcttgctacttaaatacatatcagcgactcctgctgctggcagtgcttcggttccaacagttgctgcagtcatgtttatcatcattccagtttcccataacccaatagccttgttctgatactcctgatatgcttcttcgtctcctcctaattcgccatctcttattctattatagccttcttcatcaataccttgctgtccattacttatttcattacagccttcttcaactgttgcttctgctatatctccttccatagctgcaccttctagtccaacagccgttcctgcgactgctgctgttgctacacctactcctattgctgttgaaattattccaccttccattaaagcccctgcaactactaatgcagctccacctgtaaaaagtactgctgctgccattcctactgctaatgctgctagtccaagacccttaagaagtgtcttctctccactttctactctcgcttcatttttttgtccagctgttgatttcgctgcaaccgtctttgtttgaatttctttaggcgcttctgaaaatgctggttctggctcagcttcaattggataggcttttttctcttttccttcgaagtgtgcatcttcaactttgaagctgacatctgtggaatctattgttattccttttggtattccagtatttttaacctttggatctggataatggtttaaacttactgcattacttcctactattgatatactattagcatttaagcttagagaacctgagcttctaattgttatttttagaccactttttatatcaattcctgaagaatctgtaagttttatactatttagtgtaccactttgcgcactaatttcaatgcttcctggtgtaaattcaacttttttgccatctttatttgaccaaaattttgtatctggattaagaccatctccactgtatgttgtaaagcttacactagactgcgcttcttcattactcccaaaatatacttttactctatctcctgcataaggcattgaatacaaagaatcattacttccaactattacttcataccaattatagatagcttcattatctatatctaactgtactctggccgctgttccttgaacttcaataacagttcctcctatagcagttcctcttatattttcgttacatatacgtggtacttcaatttgactagtatccaaaattgtatatgtatttttaagttctgaatccactaacttggattcactcttaactactataaacctttgattgtttaatacaacttcacagcctatttcgagaacttgtccagttaatattttatattcatatttctcttcagtaaaactatcaaaatattttataaactcataatctcctacatttaactctactgaatttcttacacttatcccaaaatataatctaggtaaattaaacaagtcttctggaacaataaccaggcctaagcgtgatgccatacgctttaaaaattcaaaatctgtttcattatactgtataatgaggctttctacattttgaccagctttatcatctgaaataaaaccactttgtacatagtcattttttactatatttaaaatatcatcataagttatgttaatttggttaaaagatcttttctttaatttttgatccataagataggaagcagatttagcctctattattacataataagaccttttgtattcttttatctctacatcaacgataattcctccaaaaagcttttctgctattccttctccatactttaagtttatttcagctccatattgtattttatctaaataagtatctttttctttttcatctataatccctactatagttaattcggtatgtttgtttatttctcttttaatctcaatatctataatatgctgcagagaaatatctccctgtatacttaactgattgagattcaaataattagactcttccattttattctcctctctatggcctaagctataatattttcaaattctataccctcactagttcttcctatttaggtgtttgctcatgatgttcaattgatatttctccaccatatttgcaatgagttacacaattatctgttaaccctggtgcattttcaacaagatcattatcttgtcccccctgccagggaccaagtatctttgctttgcaacgccaaacctgatttcctttactatcataacctttttctctagtatctccaccgcaggttttattgcaaaatccgaaatgagtgatgttttcaccttctttataatcatttatgttgagcttaggctgtcctgctgcgtaaactccatgagaaactggaatcataattctgcttttcatgcttccgcaggaacacttaagtatggctcctctaattacatatacttttgccatgctatccctccttaatccgtctctaccatttcataatttagtccaataacatttcttctaagtaaactttcacaaactgataaatttaaaatcaataccttttttacgtaaatggagctactatttttaaccatcgaaactaaaaacatggactcattttctatcttttccttgattaatactaagttttttattgataaatcaacacctagtattgctttatcacttacacattctattagaggtaaatttaaagtccagtagatttcctgagtctcttctttttgatctataaatacaacacgattatttattatattttctttgtactttgcaaagattgtttttaatttatgcgatattaatacatagtttctgcctattattaaatctgtaaagctttcttttttactgtcataatttaatattgtagttttgttatattcattattcttattaatttcattaatatatttactcatttgatctttatataaatcagaattatgggttactttaaaaaacattcttttattccccctaacctaacttaatactgttaagctgttcatcacttaagttaatactacttaactgatttttattaaactttgcatcttttaaatctgcatttgtaaactctacataatttaatatacattctctaaaatctgcttgctttaacccacattctgtaaagtcaaccttttctatagaagaatgcctaaagtcacttccatttaatattgactttttaaaagaagaatcttctattttggaatttaaaaattgtgttcctaaaactcctgttaatatagttttacttctatcatatatattagttgaataaactttttgaaaccttaccttcttaatatttgaattataaaaaaatgcatcatgtaaaatgcttccttcaaaactgacactatttaaggagcaatttttaaagctggtttgagctaaagcacatttttctaatttgatattttcaaaaatactttcatcaaaaacatttccaattaaatcatgaaatctatattctttgtccttaaaatatagatttttaaaacatcttcctcttaaagttttcatttgatctatataagttagagagatttttaaatcttcataagtattgctatcgctgtatattatcaagcctttatctctgtattctccagctgcaatataaaatttttcttctttattaatttctttaaatttattatttttaacaatatcacctaaagcgtaccttgctaattcaataaaatagtatgttgttattcccaattgctctaaaactaatttttcaattttatcattcagatatttcttgacgtattttttagtgtccatctttaaatattcttctaaaatatgaaattcatcaaatattgttcctaattcaaaagtataagtaattggcttctcatcaaataaccagttttcattaaaagcttctacaatacaatttatactgctagttttaaaacctgttcttaatagtgaaatgttaatagcttgtattttttctttatttcctgcttcctgattacttataattttttcaaacagtttatcaaatccatctgctatttcattagctaaaatatctttgcttataaatatattttcctgtaacttttctttatgtttttctattatatcctcatatttttctattaaattttccatacgttacctctcatttactgtgacctgcttacctgtaacagtaacattgtcatcaatattaatttcactgcctccgtctccacctgctatatgaattgatcctgcagacagctcgatagttgaacctgaaattgaaatatcttcaccagcagtaatatttattgatgagtcagagtaaatctcaatcccctctttatcatccaattttatatataaactttcaccattcgatataatgtaaattccccctggagtcaattgaatttcttttccatgtattgtgctcatataacggatatttggatcaggctgagttggatttataggaactgcctgagtaacaacagcattttcctctttgttgtctccaaaatataatcttgccctgtcaccaatttcaggcataaaataccagcctacattgttgggagaagatgatatacttgaaaaatgaaattcacatgcttcatctatgctttgagtctcatcaatgtctaaatgaatccatacattgtgaccctgtacatttataatttctccttcaattgaagttccaacaattttttcattatatactgtaggcatgcttactccatttttagtttttaacacgtattcaaaacatacctgtgaattttttagcgaaatctctacctctgaaacaaaaaatctcattcctttaaaaacaacttgtcttccaagctgcaagatgcactcacctttaaccttataatatttataatcatattctgatacatcacttttataattttcctgcataattttatagtcattgaaattcttttctatattccattcataaatattttccgttatgtcttccatttcgctaagttcatcaggccctacttgtattcttattccttcaagattaatagcattatatagtccacagttaaaagtggacgctattctctttagaaactgccagtcagtttcctgatactcaatatatggcttattaatagtacttgctgacattgcttcatcttctatttttattatttttccagtatattcttcagtaattttattaatcagatctgaatattgcatgtccttattctggaatgaacggcttttataaactatatctaataaataactataagaaatacctttcatgtatatatacccaacagaatttctgaaattaagatttaattcatatactaggccttgaaaaatttcaacttctgtattttcatcacataatactaacttcattggctccagtgagcatatatttccatatgcatttatctgctcttctgaaataattccttctaatataagcgtcccatgctcattaatcgaatttacaattttcaatttcttcaatactactaatgaaaattcttggttctttacaaatagccttgctttaattgcatctccctcaaaaaacattattctctctccctttcatcactgaatacttccaagcactccatgattccttttccgacagaatcccactcatttattctgtctcccatacaattgaaattaatcatgatagtactactctctattacaagataaaatataaaattgtaacttttaatatcatccactgggtttaaaaaagatacataagttatcttatatttatcctttattttcacaccctcctctacccactttaaaggtagacctgcatactttttcattttttctgctaggccttccttatattccttaagtgttaattctttaggagtactctctatacgagttaatataagatttaaatctttaatttctgaactaaaaattttattattttcatctatatcactactctttaattcatctggaatagctaaacttaaactattaaagaatctttcataatgaaatttaacttctcttcctccaatatccgcacttcctgccctaatgtattcgtataatttttcatcatactttttcttttcttttagatactcaagtaattcatattcttttttcttttctagaaaaacctcatctaaatacttttctcccacttgtcttcacctctcaatatctattattaattttttgtcaaattgtacttataactttaatcacaatcccctaattttgatgtgtatcatgtattagcatcatcatcttctactatattccttcctaagttaaagttataattcaaagtttctacacatagtacttttgttgttatctttcatgttatttcatttacatatacattcttcaactcttgtacatcttcacaatatgtaccttctgtaacagaataagtgtttacctctgccactccatacattacataattatatttacaagcattttaaggatgaatttcgtaatcagaatctatattatccttatacgattacagtaaattattatgtcctagagctaggatttattttactctaatgctttttaattcattaataaattatatttatactctttatattcttaagtttcaatattattggaacaaaacgtataaatacaggcataaaacatataaattaaggtataaaaaggtcaatttataaattcattctccatatgttgtagttttttttgttcataaaaaaacaaataatttctatctatttatgtaaaataatggatatataagctcgaatatgtctttaaaaacttatttaaatatgtggcttgaagattatgttaaagaagaacgctctgaaagaacttatataatatatagagatactatgttaaaacatgtaattccgtgtattggcaatattaaacttagtgatcttaaggttgttcatgtagagaaatacctgagggaattgagaaaaatcaaaaataataatggaagtactattcagctaaattttaggaacttaaaaaccgcattaaacaaagctgtaaaactacaattactaaatgataatccctgtcgatttgtcgaaatgcctaaaaaaaataactttaagggaaattatttaacagcagaggaattcaacttaatatataacagcctaaatgcagctacttatttaggttcatcttttcgagtattattagacttagcagttgaaacaggttgcaggcgtggagaaatgtgcggaacagaatggcgtaatattgactttgataataaaacaattacttttgacaaagcattaataaaaggtgaacacggatggaaaataggaagattgaaaactgaaacatcttatagagctctcccactttcagatgatttaattaatcaactaaagaaattgcgaattaaacaactagaaaacaaattaacatttggctctgaatatcatcttaacagttttgatggtattgaatatgatcttatttgcattcaacgaaatggtaaatttatggtaccaaatgatgttagagatagattaaaatacttactaaaaagaaataaaatagataaaaatatacgatggcacgatcttagacatacttctgctactctacttttagaaaatggtgttgcaatgaaaacgatacagaaaagactaggtcatgcttcaatgtcaacaacctctgatatttattcacacgtaacagaaaaaatggatagagaagcaactaatatattaagtagaactattaaacaaatataatgattaattaaaataataataaatcaaaatgtgatttaaatttactctaactatgttagtctattcttaattaattaccaattatatattcgtatctaatcaaaaaaatatattgaattatgggcttattatttttttgcccataacaagggaaaatacaagggaaaattcaaaaaactcgaaattttctcttgtatttttttccataaaaacttatacaatttcctctatagtaattacattttcaaggctatgaagctttaaaatgtactctgaatgattaattttttcaggtaatgttaaagtcattctaagcccaattatatgattgtcaagctctttagctttcttaagttctagattagaaatttttgttccatctaattttattgcattcataaagttcgtaacgcctgctatatgcttgagttcagcatatacatccaattcgttagacttagccctataatgtaaatctgctttatgaagtactgttaatacacctaataagaaaaagcatgaaataatagcgccttcataaaatccaattccaatggcaagtcccatacatgcacaggcccaaagaccagctgcagttgtaaggcctttaacttcattacgcccaactacgataatagtacccgctcctaaaaatccaataccacttataacttgagcacccattctgcttacatcatcctgaatgtgtaatatatctctcatgtattgtcctgttatcataattaaagttgcaccaatacaaactaatatatgagttctaagaccagccggccttttttttcttcctctttcaagcccaataatccctgcacaaattgtagcaagagtaagccttaaaattatagatgcagtattaacttccctcaagtagtttgtcagttcatttattgtattatccatataaccaccttcataattgctggtatcttattgttaattataattaaataattctaaaatttcattttcatttaacgaatgtatgaattctcctacggataaatcatcacctaaaatcttatttattagctctcttttggaatcttgtaattccactattttttcttctatagttccttgggcaattaacttaatcacttctactacatttttttgaccaattctatgtgctctatcagttgcttgatcttcaactgcaggattccaccatggatcaaaatgtattactatatctgcacttgttaaattcagccccgtaccaccagcttttaaggatactaagaatacagtgttttcaccattattaaattcgtcaaccatcttcattctattgattgatgaaactgatccatctaaatatgaaaataagaaatttttttctttaagtattttgcttatattctttaatacagaagtaaattgagagaatactaatattttatgtccctcatctatactttgttccaataattcaattaatgcatcaatttttccgctacttcctaagtaattatccatagttacagacggatctaaacatatctgacgaagcttagttatataagccaaaatttctattttgctcttactaaactcaaaatcttcgactttcttttggattaaatctttagtatagttagcatatgtttcatatacaactttttgctcatcacttaaaggaacaagaagtcttttttctattttatcaggtaattctttaattacatttttcttataccttctgagaataaatggttttacaagcctatttaactcttcaagaatttctggtccttcttcaagccttctatgatatctagttacaaatttcttctcattatataaataccctggcattataaaatcaaatattgaccataattccattaatgaattttctattggtgttccagtcaaagcaaatcttattcttgcttttatttccttgacggacttagaacttagagaagattgattctttatgttttgagcttcatctaagatacagtaatcaaaattcatattatataattctatgtcacgtcttaataaattataggtagttaagattacatcatattctttgtagttattaatcaattcttctctttcttcttttaccccattgcagattgcaattttcattgatggagcaaatttattaaattcatttttccaattatagattaaagaagtaggtgcaataataagagtttttgaatctggctttgaaagcaataatgttattgtttgtagtgtttttccaagtcccatttcatcaccaagtattccaccaaaacctaagtaatctaaagttctaagccaattatagccttctttttgatactttctaagttttgcttgaagtccatatggaggttgaaaggctttatccttaatgttgcttaatctttctttaagatccttaatttcatcacagctatttatataccttagctctttgtcttctaaataatcttcaagataagctcccttgttaattggaacattaatgagattctcatttaatttttcttctaaaagtaaattatctataagggtcaatgattctttcaatgcttcatcttctaggtctaagaattctccattctcaagcttgtaatatttcaagttatctctaaagcttctaagtattttggcagtttcttcttgagatatatcagaaattttaaattcaaattcaaaatagttgaatttaccttttctaacttccccaacaaaatctgatttcttaatatcttttattcccttaaatctctcagaataaaatacttcaccatatctttggagcttttctatatcatatttaaagaatttaaaagcctcatcatcatcttttaaaaagaataatcttccattgacttcttcaaatccaagactttttaatactcctaaaacttcatattctttattagtatctctgtaaataattttatctttgtattcttcaaaaaaattaaattcatgtccttcatatgataccttaaacaataatgaaatatccttatctttatcaaaataaaacctgaagattacgggcgcgattacaactttttctctaatatccttagataaaactaaatcatttgttactttttgaatcgaaggtattaattctttcaaaattctactttcattgattttattgaaactaactttattagtagcattaaatatttttaaatatggcgataatctctcacattgttctattgatggaatgtatatggaagtaccaaataagaatacatcttcatcttgagttaatgattctggtattccattaggagcttctaaaattatattgttatttttgctcaataaagcaagtggaataggcatatccccttctattatttcagattctaatattctataaaagaatccatcgcctaaaaaaactctattcttttttataatgtataaaaattctttaaacatcatatcaggaattgtaagagtctttccttctattaacttatcctgataacgtctaaaatttctatcatgatctgctaagttttttatattattcatgaattttattaatcttctatcttcatacgaaagactttgagtttttatatcaaaaataaattcttttccgtacttaattggtactttattataaacgcatgttaaaaattgattaatatctttaactatatacatcttattgctttttcttaaccctattttaaactcaatttgaagtttagaggaccaattgtttttattaataataacttcgaattttagcttttctttatccgtatccccaacaagtaaagataataaatcatcattagaattctccttaattctaactttattatttttaacagataaattattatttaacttagttcttaactcttcatcctcatcaatatttcttaagaacgtataaaaagtagctattatatgtttacaacagtaattatcacgagaaaattcgtttttctcaaagtctagacaactacaatgagtccctataatttctttagtcatattatcaatttcaagcttacacgaatattcacttagaaggctttctgaaactacatttgagtttatttttatataatctttatctactttaacatttatttctcttaacaaatcatttttcagaacacgttgaccttttgtaagagatgaatttgttatattcttattaaaaccctctagtaaaatttgttttatcaatgtttatcacctgcatttttatttttaacttctttaattcttttaattaaatctacactgatatattgggatttagaaaccccttttctaaaatatcttatttgcttatagtcacggccttcaatatttatatctaatatatcaattctttcagcattaaatatagtaggttcattttttccttttaaatatatatgtatttccatttcattaggtgagattatttaaattagtaatttaaaaataatcccatatcctccttttaaaattatatttagttattatttttgaattcttcaattgcttcagcgatttcatttagatattcccatcgttcgtatttattatccagttcactttgcacttcttctttttcatgcatcaattcatttagtttcccatagtttgaagcattctttgccatttccttttctaaagaattgattttttcttcgagtttagcaatatcttcatctatagtttcatattctttttgctctttaaaagtaaacttaggtttattatctttagttttttccttaacgccttttcctttatctgctgcaaattcattgccacttttatcatttgactcaacagatttaatcttctcaatttcttttgaaatcaaaaagtcgctatagttaccgttatactccttgatatacccatttccttcataagagaatatctttgtacaaattctatctaagaaatatctatcatgggatacaacaatgattacacccataaatttatctaaaaagtcttctaatatttttaatgtttcgatatctaaatcgttagtaggctcatctagtattaaaaagttaggtgattccattaatactcttaaaagatgaagtcttcttctttccccaccagataatttttcaatcggagtatactgcatagtgctatcgaatagaaatctttcacacatagtagaagccattattttagtcccatcttctacaggtatatattctccgccttctttaacataatcaattactcttagcttaggatccatattgctgttgtcttgtgcaaagcaccctatcttaactgtatcaccaatttcaatttttccactatctataggaagtctgcctctaagaatattaactaaagttgtttttccagccccattttctccaatgataccaattctatcatttctcaaaaatatataattaaagtctttgattataactttacttccgaatgacttagagatatcgtataattcaactactttttttccaagcctagaaccaacaaatgatatatctacatcttcctgtcttttaatgctttcttcgcttactaactcgtcaaatctttgaagccttgccttttgcttagtagttctggctttagcaccacgtctaacccattttaattcgtttcttataagagcgtttttcttttcttcttgcgattgttctacttcaattctttcaatcttcttttcaaggaatgcagtataatttccaggataagtatataaatttcctctgtccaattcaataattctattcgtaactctgtctaagaaatatctatcatgagtgatcatcaaaagagcgcctttcctagaatttaggaactcttcaagccattcaatggaatctgaatctagatgattggtaggctcatctaatataagaagatcacatggtgttataagtgagcaagcaagtgctattctcttcttttgtcctccagataagtttccaaccttttccgaataattctttattccaagtttatttaaaattgtctttgcttcactctccatatcccataagcttaaggagtcaatttcactttgaaccttaagtaattcattatttaaagaatcaaagttttcaccattgcaactattgatcttatctaataactcctcatatctttttaaaagtttcatttctttagtgtcacctttaaaaatttgttctaaaacagttgcatcttcatcaaataaaggattctgatcaagatattcaattctaacatttttaccctttactatatttccatcgaaaaattcctctcggccagaaactacttttaaaaatgttgatttaccagcaccatttattccaattaaaccaattttatctccatcattaattcctagtgaaacattatttaataatattttatcactataattcttgcttatattttccaaagtaattatattcattaattttaaactcctttatgtgattatatacatactattttaacataggatgctcataaacagaaatttagattgaatttaaacaaaaaaagactacctatataatatagatagtctaaaagtaacatatcttgtttcaaataattactgtatatattaatgattcatttattttttttaagattttgacttgagatttcatatctttcttcattatcttctgtattataaaaagcattacaaccaatcaataaagcacaaacaaaaattactattcctagcataattattccccctttaatatggatctgattatatatttattataacacaatccatatgtaaacgatatactattttgctttttttttatttctatttacatcaatttcttgattattgttttcttaatttataattttgcagaattttcaaaaaattattgacaatgcttatagcttttgactataatttatacaaacctatataatttaaaaactgtgaagaggaagagtacatatattactgaaataaagagagagaataattgctggaaattctcatgatgtatatatggaatgtagccttggagtttttaatcgaaatcttaattgttagagagtagaattaaacggattgtctaccgttaaaaggacaataatatcggttctttaacccgtattattaataagtgtgtatttgattatacaaaattaggtggtaccgcggtgattatctcttcgtcctataatatttataggattgggagtttttttttacacaaaataatatttaatcttatatcaagtaatcaaaaagtaataaaatcgaacttttatttaatcaataaagataatgaaatattctaagatatttatgtaaggagtgatttctttgaaatataatggtgctgaaatagttattaaattattagagaacgaaggagtagaatatatatcaggcattccaggaggatttaatctcccactttatgatgctttatataaaagcaaaaaaatcaaacatatattagcccgtcacgaacaaggcgctggatttattgtacaaggcatttcaagaagtacaaataaagttggggtatgctttgcaacttctggccctggagtaactaatcttctaactgctattgcagatgctaaacttgattcaattcctcttgtagctataacaggtcaggttcctctatcagcaataggtactgatgcctttcaagaagttgatgcttatggattaacaattccaattactaagcacaatttcttaattaggaacatacatgaactttttacagttataaaagaagctttcaaaatagctttagaaggaagacctggaccagtgcttgttgatattcctaagaatattcagaatgaatttatagacttagaagactttccttctgaaattgcatctgaaaatctgcctaaaagagatgcaataaaaagctctactctttattgcatagctgaattaattaatgattcaaagaagcctataatttatgcaggtggaggtgtagttaattcaaatgcttcatccaacttatataaaattgcaaagaaaaataatataccagtttctttaagtcttatggggcttggtgcttttccttgtgatgatgaattgagtattggaatgcttgggatgcatggcgcaccatatacaaattatcttctaaacgaagctgacttaattttggccctaggagtaaggtttgatgatagagctacaggtaatatagaaaagttttgtcctaatgcttctataattcatattgatattgatccatctgaaataaataaagttaaaaccagtagtttatctatgatcgcaaatgttgatgacttcttagaagatatacttccacatattgaaagtaaaagtcgaaacacttggagggaaagagttaaatgttttaaatctaaatatccactcccttcttataaaaacatattgcatcctgctaatataattccttttgtaggcaacatagttcctagtgatgctgttattactactgatgttgggcagcatcaaatgtgggtagctcaaagatacccttttaaattaccaaaggctttactaacttctagtggtcttggaactatgggatttggacttccagtagctataggtgctgcattggccaataaagataagactataatctcattctgtggtgatggatctattttaatgaatatccaggaactggctacccttgctgactttaatctgaatataaaagtaattattttgaataatcatcatttaggcctagtacgccagcagcaacagttgttttataatgaacattatatagcatcaaaatttatatcaaatcctaacttcaaaatgatagcagaaggctttggaatacaatcttgtgatttaggtaatgaagaaaaacctttagaaaaattaaaagaattgttaactacagatggaccatgtgtaattaatatacctattgaagaaactgaaaatgtacttcctatggttcctcctggtaaatcaaatatagatatgattggtggtgaaaatttaaatgattaatactaaattttatcttatagagctacatgttagaaaccattctggtgttatgagccatataactgggctttttgcaagacgtgcatttaatttagaaggaattttatgtgcacaaataggtgatggttctacaagtaaaatgtatttacttgtcaaaaatgattctgtgcttgatcaaataataaagcaattagaaaaactctatgatgttattgaagtttcagtacaccaagattatgatcagtctgtatttgaaaacttaaataaagtactaaaacttaaacaagaggatatttgagatttgattctataacttaagcttagaataataaataaaacttagttttaattcagaaataaaaataaggataataaacaatatctctactgtttattatccttactaaatgaaccgctctataagaaagtttgtaattatcttgggagtataatgttagcattgtgtaaattaatattaacatagttttaaaatttatacaagactatttttatctgctttatatactatttaaaaaagatattatataaaatactcttcaaaaatactttttataataaaaaaatcgcaggcgactgttgttaagttccgtattgtgcttcgcactcttttcatatgtgtagatttttttcacgcatctgccttttcgaacgcatgtgagaaaaatctgcacataagaaatggcagctatgctgcatataagaacattttatgcaggcgaatataatctatttttttattcttttataggaattaaccctagtaaaatatactactataaaagttatcaacagatttaattgcattataatttcctaaagaataaaaaagctaatgcacataaacattagcctttaaattttaggtcatatattaactagtttagttcttctatttctattttaattaaatgaacctaataaatacatacccccaaaaataaaaatagctactaatactccagtcagcgctaagcgtaatggattcaatatgtttaacatctgtaaatgttcttagttttactaatattaaatttattcacctattaattcattcttaacatattcattaatattttcttcttcgccttcaaatatttctgtcaaatgtaatattatctcttgttcatcttcaggaagatattttattgtttctttgattgtatctacatttacatctttcataaaataaaatcaccgccttaatattgttttatttctaaatctcttagtacagctttttcatgtttatatgttactataaatctctgtttattatctttagattatgttaataattccttaatataatattacaaagtgttaaaagttaagttagctccaaatagggataaacttattatgcaaatagtctattgtattttctcatttgacattataacttattttcttgtaaattattgtctttatgtgaaaagaacttcaagttaatatcacttatttttcaacatatttattcatataaagtgcttgttcgaaaataagtaagatataaactaatatataagaaacatttattttaattattatataaaacattaaaattattgcaataaagataaataatttattatataattaaattgaatactctcatgtttgttgctgttttctaaatatgataagaaaatatcacatactcgattatagagatattgatattttcactacataaatttatattaaatattagttgttcattttacttaatttaaatggttttgctatgttgatttctttgttttttaataactttaaacccatatagctaataaacactatggtgtagctgcttaaccttacccaatctatttccttttcatttaaaagtatcagtaaaacatgaagatatgctaaaaagtaaaacaaatacgcccatctttgaatcctcttccattgcttcccttgcattttacgtcttattttcttaaatgaggtaataagtaatggtatcattataataaatccaatgagtccaactgctatatagcttaagtataatacaggaaacgaaccttcattaatgattttaggaagcttgagtattataaagcgaataaaatatactattccatgaggtaacagcatgattgcacctataatagctaattctgctctaatgctgcgtaatttcttggttattgtccatttttgatttaaagctcctgcatacattactaatataaaaaatgatactgatattaatcctcttattgaagttttttcaagggttagaataaccccttcaagctttgcgttagatgttattcgtagtatttcataaaatgatgtaattatcgcaacacccgttgccagcgaataataaagataataatgtttcttaattgatgatgttaaaagtaatgataaaatcgttactagaattaatgtacaaataaagatcatgtttctactccttataattattattgataatgaatatcactaacaattatattttatcatggctattacgtcaagatttagcaatctttattttatctaatggctaagaaataaagttaaatgaatttataatcacttttcttgaatattgctttaagattggtatatgttggtcatcatcacatagaaaaagagagaaccataattattatagttatcccttaatcttatttcctatataacttatattattctaccattcagcttttgttccatcataatttttccgatttggattagaccagttaagatcttccattgcaacttcttttactttattctcatcaataataagtcctagacctggcttggttggtaaatccacaaaacagtctttatattgattgaataaggccttgctattaagtgaacactatgtctaaagaaatatgttttatttactagaagtataaaagaagatatctcaaattaacagaactttaatgatgggagaatataaataatgtttttaaaagttgaaaatttaagaaaaagctataatacaggtgatataactactactgtcttaaaaggcaccgatataagtttagataaaagtgagataggagtaatactagggccttctggttctggaaaatcaacacttcttaatattataggaggaattgacagatgcgattcaggtattgtttcggttgataacatagacattactaaactaaatgctaatcagcttacagattataggcgagaaaatatcggattcatatttcagttttataacctcatacctaatcttactgtaggtgaaaatatagaagttgtttcaaatataagcaaattaccgcttaacattgacgaggtactgaaagctgtggatatgcttgataaaaagcatagatttccaagggaacttagtggtggtgagcagcaaagagtttccattgcaagagctatagttaaaaatcctactcttttgctatgcgatgaaccaacaggtgctctagatttttcaacctcaagagaaatcttaaagcttcttcaaaaggtaaacaaagagtttggcacgactatacttatgataactcataacactgcaattagtgctatggccaataaggtttatagggttagaagcggtgaaattgtagagagtacagttaacagcatcacaatgcttgcagaaaggattgagtggtaatgattattaataaaaaaatcaaacgaaccatgctggaaagcaaatcacaatatataggctcattagtacttatcgtttttagctgtctgctttttataatgtttaacttggtttctaggaatcttacaaaactatcttcttcctttgaaaaagattataagcgagaagatgcaagctttatagccactccaagaataaataacattgaaggtctagaaaaaaaatttaatatgagtatcgaggaaacaaagtcatttgactacttgctatcagaagataaaaccctaagaatattcagtgaaaataagaaggttaatattcctgctataattcaaggaaaagctctaaatagcggtgaaattctcatagatccctcatatggaaaagccaataaattagatattggagacaacatagaaattaatgataggaattttataatatcaggttttatgtctcttcctaactatatctatcccttaaaaagcgaatcagacataatgaatgatccaagcagctttggagtagctgttataagtaaagaggactttaatattttaaataaaggcaatgtttcttattcaataagatttaatggcgatagaagtaatgtagatagcaagatatcagagtttaaagattatctaagaaatgaaaatattattcttataagttggatgaacacaagtgataatccaagagttacgtattttacagcaaagctttctggtattgataagatgagttcttctatgcccatagctgtacttcttttaacatgcatattaactggaattgttatgtatagaatgttaaagagagaagctgttattataggaaccctttatgccttgggttatagaaagaacgagattatgaagcactatatcctataccccatagtcgtttcacttgtaggcggtattctaggaactctccttggattactaaccttaagacctatgatgaactattatattttattctttaatattccagtaggttctttaacctatgatataagctatattataataagcattttactgccaatattcttcttattaatctgcagttactttgtagttaataaatccctaaaaaattcaccaatccagctaatgcgaggtggggctgaaaagaataaggttggtttcttagaaagaaaagtaaaccttgaaagattcaattttaatactaaatttaaaatacgtgagctcctaagaagcatacctagaagcatatttctgttacttggcatagttatgtcaacaatgctgctactcatgggctttgcatctaagagctcaattgactccttacttaaagaatcttttaatgaagcatttaagtatacttatcattatgtatttaactctatccaaaatggtgagccagaaaaaggtgaaccattcttggaaatcccatttgcaatgaaatatgatgatgcaactaattttacagtatatggtgtgagtccagattctaaatatatttcctttaaggataaatcaggtaatacattgaaaccagatagaatcatcgttacaagacctttagctgataagcttaatatatcgccaaaagatacattaaaagtaattaatagattggattcaaaagaatacagcataacaattgatagcattgcagaaacatttgtaggacaatacgtctatatgccgctagatacacttaataatatgcttggtttcccttctggaagttatattggattatggagcacagaaaaaatagacattccagaaaataaactcttaacagttgtaactgttgatgatatgaaaaaagcctttgatacaatgacaaaaccacttcaagcaataatcggaagtatagcttccatatcatttataatcggacttatcgtaatatatgttgtcacttctctaactatagaggaaaataaagataatatttctcttttaaaggttttaggttatagaaaaaaagagatttactcattaattttaaatagttctaggtttatagtggtacttggttatatactaggagtacctctcctacttggttccttaactgcactatttaaatcaatgacaaaagaaatgagcatatctttccctgtaacacttgattatatctatattataattggtttcgtaataatatacttaacctttgaattatcaaaattactaagcagaaaaaagataaacaaaatttcaatgtctgaagcattgaaatctagagtagaataaacataacaatatgcttttttatatagtataggttatcaaatgataagatggtctgttatgcagtttctagaaagataattataagattctggtaactggttaacagatcatctctaaatgcacgaaagaaagctcatagtaaacaaggatggaataacttttactctatattatatttccatttccttaacattatcagctattattaaatcggcatccgttgttttcactacttcatcaacagttaaacctggtgctacttctattagaactaatcctttatctgtaactttcataactgctttatctgtaattattagattaacacatttggcagccgataaaggcaatgtacatttttttaatacttttggattcccttttttatcattatgacttaatgcagctattacgtatttagctcccactaaaagatccattgcgcctcccataccaggcgaaaaaactccaggtatttgccaatttgcaatatttccttcttgatctacctctaaagcgcctaatgcagttatgtcaacatgtccacctcttattattgcaaatgataaatccatatcaaaggttgatgatcctggtagtaaagtgattggagatccacctgaattagctagatctggatcagattctcctatctttggagttgcgccaaacttcaatgcgccattttcacattgtagtgttatttccattccttttggtaaataattagccgccatattaggtataccaaatcctaaattagcaaccattccttctttaaattcttttgcgattcttcttgcaattatctctttaccattcatcattttcacccctatctcattttattagttcttatccataaatcttcaaaatattttcttctatcttcaaaagaatcaccttgaactattatatctactaatatacccggtgttccaacactatcaggagggatttcaccaacctcaactatttcatccacttcggctataactaaatcagcagcaagtgccatacttgtatttgttccttttgttgttcctctatatacaatatttccgaacttatcagccttacagcctttaattaatgcaacgtcagcttttatagctggaaatactaaatattcctttccatctacaataagtttatctcttcccttctcgatttctgtaccaagtccagttggtgttataactgcgccaagtcctgctccaccagctcgtatacattcaactatagttcccataggtataaattctacttctaatgtgcctgcattatattgttcttgtgcttcagggcaagtaccaatatgcgcccctacaaatttttttatttgtttatttgctatgagcttaccaacatcatgagtttctcctggttgagctgatacagcttgaataagtgtaagatctttaatatttgtattcgctagcgcgtctatcatcttcaatggagcaccaactcctaaaaaaccagctgtcatgatcttcatgccatctctaatattttttactgcttcctgtactgtcttaatctttgtcatttctctatacacctccggatttttataatatgctatgaattattaaagaaaatttatgatttaagaccgattacccctttttgaaatttaattgttataataatattattatttatgaatttatattccaattaaatccaaaaaccaaaagcataacatctaataagtttttataaaatatttcacaacatatggaagtgcataagaattactattttcaatttatctaacataatgaattataagtttattaaataattgatttgaatttcaatgagcttttgagtaaaaaatagatgtgaattagaatgatttttcctaattcacatctatttttataataatcttttaatccactaagcccacatatttgctataaattgtaaaaattccaggtttttcttctcactttttcataaatgtacattgttaactttttttattcttttatttaaaaaatgtttcatttgaaaacatttttccttaaatatgtatttatttaaatcattaaaaacttatttattcttaaaaaggtttaaaggtttattggaatctttctaagaataaatgaagtttaatttaaattttagttatcgcttaatatatcctcaattatattttttaagttttcaccttgctcaaaatctggatctaattcaatagacttctctgtatactctaaggccttatcaagttgttgtaaattataataacaaagtgcaatttcgtaatttgtttctgggcattcaccataaaactctagtgaagattctaaaagctttagtgcatcattatcatagccaagataacctaatatagaaccaaaataatatcctaaatcgccttcttcaccaataggaaaatagtattcccaaactttattgatagcatcagcaagttcatctttagggaagttttcttcattttctattctttcaattaaaatattgtataattcaagcaaagttcttgaatcccatactgtaaatcttagaaaagccaaaagttccttagtggtcaaggagctactcaaaggcataattgcttttttcattatatagaaatcatctggccctacactttctataatttcattgtaagccattgaagtttcaataaaatcattatcactattacttgccataaatagagacacatttatgttttcgtgttcatatatactatgtattgtttttccaccaagtgctttaaaatataactctatagcatgaaaatttaccgtcatagaaatgcatccatgctttgataaaaatggatgataatttttatccatactttcttcattcttataacctttatcagcagatatcaaaattacatcatcattaaacaactttcttaatcttgaaatacatcttaatccaattataggcatatagaatgctgtatcctctaaagaatttttgtaatgcatcaaaacatcatttaaattcttatcttcgtaataactattcccatcaatttttttatctgtataataataatctaatcctgcaagaattgatttatcattaggatctcctttttcgtctggagaagttattgttattactccttcataaatctctccgttattaacataaaaagtatcttgtggaagactgtcaaaagtataattagcaaatagaattaaaggattcttcattttcccttgtgataatacttcaccactatgtctaagtttaatttcatcatccttagatatatcaaaagttgcacaatcaagtattccagcttcgaaataaggacttaaaaagctatgattctgccaatattcaatatttctttcagcaaaatccgttactatatatttaaactttatatcttttaacgaagaattttcaatcatatgtaaaaatctttttagaaacgtataagtaaatcgtccaactcctgctgcaagctccataatatatataacagtatttttatctacatcttctcttgcaacatagtctcgcaaatatccaaagacagttttagcgtattgatttgcgatatacggattggttgttatatattgtggtacaatacctttaatccaagcctctggaccttggtttgcaaagaattctgtctgcaatttccataacattgactgtgataaaggcttttcagcttcaactacagctccagaactctcgttaactttcaaatttgaagctttagtgatattatattttttatttttttctgacaaaacaattcctccctaaaagtaaagttaaaaattacttttactaaaatatcattaacagaatgattatactattctaattaatttatgtatatagataaaccaactataatctatacttatgagcatagctcaccgaaatgagtaatatacttttgttccagtcggagaatatttcatagtttataattgtgttatctataaagctagatttatgcgataacttactgaaatcataaacattttgttctgaaaagcatgaaaatatgaacttaatgttttagtaactttgtaaatatgttcatctaataaatcaaactcttaaattatttatctatatacaagttttatccaagatactggccccaaaaaaatcataatcattatttctagttgggatatatttcaccgtatgtcactggtaagactcagctttccaaataggctttttcgtgatttatgcctataattagtaacgttactcacaaatttaatttcaacataaatctatagagaataaagaggctacgtaaaaaacgccgcctctttatatacatgttttaataataaatatacatttaaaattctataaataaaaatcctcagttaaagctagaatgtaaaagcttaattacaacacatatgttagtatttgccctaaaattattttagcttgtttttcttttgcttacagaactttatctgatgttcatttacttaccttcagcacactttttgtattctatagttttttcaactggtttaactatggatttatcttgccacttaccttgcctgtaacgtattacacttgctatagctgtaatagtccaagttagtccactggttacccacacactccaaactcctaggaaaggaatcatagctagtccactcgaaaatccaactcttccagccacttcaacaaaaccattaaccatagcataaaatgcatctcctgtaccatttagtacacctcttgtaacgtaaatcattccaagaggaaagtatgcacaacttgtaatctttattgccttatctccaagatttattactgattcatctttaacaaacacttccattatagcttgaccgccaaattgagctgcaagaaaagctaaaaggctaaatcctgcaactatcaaaatgcttttgtgatatcctttttttaccctatccagtttattagctcccatattttgacctgcaaatgtagacatagctgcccctaatgaattgaacggctgctgtattagctgttctactctactagtagctgtaaatgctgcaacagctgtctctccaaatccatttactacactctgaagcgctactaatgaaacagcaatcagtgaattttgagctgctacaggtactcctatccttatgcatttagttatgattgattcacttattttccagtgttctttctttaatttaaaatatggattcttgatcaaggcaaataccaagcagccaattgctgcacatgcctgagaaataacagtagcataggcagtacctgatacaccaagtccaaattttagcacaaagattaaatctaataaaacattaattgcgcaagaaataattagaaaaactaaaggtgtactcgagtcacctaatgctctaagtatggctgctatagcattatacgctgctacagctatcattcctcctgatgctattcttaaaaaagctacagaatcatttaaaatttcaggtggtgtattcaaaagctgtaaaacctgacgtgcaaaaacgactcctaatatactcataacaacaccagatgcgccaatcacataagttgaattggcaatcgctctctttacttgttcttccttcttggctccaaaatattgagaaatgattatacctataccaacagacaatcccaaacatacagagaaaaaaagaaaacttagagatccgcaagcacctactgctgctaaagcattagcaccaacaaattttcctacgactattgaatcaatcaagttataaaactgttgaaatacattgcctataagcattggccaagtgaattttataatatgggaaacttcattaccttcagtcatatcatgtacatattttacagacataattaaaaactctccttcttttgtttacttcaatattacatggatttgacaaattaagctggcaatatattaacccaatatagacatatattgcagtgcatgttatattttttatgttaaattcaatttaagtctatattattttacaatcaatcttcttagaatttcgcaaggattgtgtttctatcaagatcttgtaataccattgaattatctacatactaattatatatattaaatatttggaggtcttatatgtatcctttttttgaagcgaataaatctggtgatcaaaacttttttagttcaaaaattttagaaaatttcagttttcctccacacttacatccatatgtagaaatagcttatgttattgaaggctctatagaagttacaataaacgatactcaatgctgccttaaggctggtgaggtttctatatgtttccccaatgacatacatacttttaatagtgatggattttcaaaaattattctatttattttctcaccagatcttacacgtagcttctttggtatacgaatggacaaaacactggagaatccatttatgtcaaaaaatattgtcgatgatgggataagttctcttttatatatgcttcatgacgaatataaaagcgttaataacaaatacgttattaaagggcttttatacaccatacttggaaaacttgattcgcattttacatttaaaaaaagtagcactttttataatagtacaatgcaaaatctacttaaatacattgagattcattaccatgagaaaatttcattagatagtatagctaaagatttaggttttagtaaattttatctctcaagaattttttcaaataagattggctaccaatttaatgattacataaatagattacggataaataaagctcaaaaacttcttagtgaaacagatcttccagttaccattatagctttagaatgtggatttgaaagtcagagaaattttaatagaattttcaaagaactaactgctcttactcctacaaaatttagaacaggtatatgatgctatttttcaacaactccacttgatgagttgaactttaaaaagcgtgttccttgaaaagttaatgttccccattcatgttctggaacattcttgaagacacgtcttccaactgtaaatttgatttcactcccagtgtctaactcaaattctaaaattaacttttcggtagttgtcatgactccattgctgtctgtatttgtgcacgtttctctttttttcttaattaattttgccttagtggatataattggtgagttttcatttttaatatatttactgatgtttataaaaattataaaagctacaaaaataaaaaatattagctgaaatccaatcatgattaacccacttcctatctttctaaaattttattactttagcttaaattttccacattttatttattttaacttgatcttgataacttatttatttaatacttatcggttttatacccattatatcacaagcttacataaattaacatattaagcattactatgctaaaataaagtcaatatttatgaaattttagtggtaagctttaatgaattaaacttatgtttgcaatacatattttcttaaaaattaaagctaagatttttaaacgcaaaaaatctcagcttattaattatcaggtcctttataaatttcctaacaccttttgaatttctaactctgtcaaaggcctatactgacctttctttagtgatttgtctaaagctaatccaccaattgaaattctctttaaatatacaacgtagcagcctacagactttaacatacgctttacttgatgcttgcgtccttctgaaatagtaagatatcccgaaacaactggctgcgtgccatgatttgagtttatattgttcacattatcggtagccatttcatgtttaagctcttcatatatgccaaacttatctacttctatctttgcaggcttagttaatattttacattgtccaatataagttccctgttctaattgttttttatcttcttcgctcaaggaacctaatgcccaaaagaaataagttttttcaacatgcttttctggatacatgattttatgttcaaattctccatcatttgtaaataacaataatccttctgtatccttgtctaacctaccaacatgaaaaattcctttcgtaccagcttcacctaaaaaatcaaatacggtcttatgaatctcatcagtttttgcagtaatacaacctgctggtttgttaaacatgtaatataattttccagcatagctgactatctcattaagatactcaatgacatcacagttttcatcaatttctattgcaggctctgttaccagctctttatttacctttaccatgccttctttaatataaatcctgacattttttctgcttccaacagccgcctctgctagaaatttatctaatcgcatatatcgtcacatctcttcctttgtaaaaactcaaaaaattttaattaacttatcacttgaaacttgtccctaatgtcaacttgttatttaataaatctaaatcataaactctattctgcaaatataattattaatttgtatacccatagtttaaagtaaatctgaatcaaataaactttttgaaacatatacatcttttatttcaatttgatccatatagattataacatctttttcattaattatttactaatttaaatttttgccatggagctattgtatcaatcaaaaacagttcttcctctgcaattcttcctaccacatttgatttaccggagtttttcataggctttttagctatctgcatttcacctgcataatgcccatataatgaactttctataataatatctcctcttcttatatctggagtattaaatacttcaaaatttttgcccttatatttaactctactttgagttgatcttattaaataatcagatacatctcctctgttaaaatgaaactcctcaagaactatttttttctctaattcaggtacatttttatttatctcacaatttaatgtcaaaacataaggatctattttacttaatgcctttaattcttcttcactagcaaaggcatttgcaataattacatcatctattaagtcagatgcccataaatgctttgcttgaactgttattggaagctctctatgaatttcaagagtgcataatccctcgtttacaggccatggaccatgatctgcactatgagatgaaataaatgctgcagttctgatccctaacgatttgaactgcttactggtttttataaaatgttcgtagcttaatcctgtatatctatgtggataaaaattatgacagcctaatatattatctgcatttggcatataagagaatatattatctatatattttgtcccattgctcatgtttaattctatttttaatttcttacttgtaaaggacataatagattcttctaagccagtaaatccaagatcaagtcttataccatagagtcctagctcattgaaaaaatctaaattcttataatcaattccaagttcatcgaatactttaggacttatatctgctattacttccatatcattttcatttgcacattgtattattttcttgaaattattgattattacttctttacttccatcaaatgataaaaggcatgtaaaaattcttttaaatttatatttatatgccaattttatataatcttctatttctcttgcactactgtgcataggataaactgatattcctagccttctcattaaaaaatctcccttattataatttttattatatagataaaccaactttgaactgaacttatgcatataactcaccgaaatcataaatattttgttccgaaaagctatgaaaatatcgctgaagtttctaagcggcaggttgcatccaatttagcatgctccaactttcatagggaagctcgactcattacattcgctgaggaagttcgagaacccaaaataaaattttggactctcacttcacaagctaaattagaacaacctacggctaagaacctttaacagctcattttcaaatgttttctccatattatgacccttgtggttacaaatatatttatgatttctagtgaagatacgaactcaaagttttagaaaatttgcaaatatgttcatttaataagtctaattcttgatttatttatctatattttcttatagcttttcaccaactagtattttaaatatagtgtttctctatttaattgatatgatttatttatcataaaacataccattaaaaaatattttatcgtctaaaattgttatattagttccatattcttttgtgatcttttcagaccttcctcctccaactggaattttataaagattttcattatctgaataattcacataatagacataatctttgcttgcatttataaaagtagctttgtcattagataacttagcttttcctgttccatctccatttactttatataacttatcactatctgatttgttgctataaaaaacggtatctccacaaacagtaacaaataaagtttcatcatcacatacttttgcattctcacttccatctaatctcattctgtaaattttatatccatcagatatattggtgtaatatatccatccattgcttacagtcatatcctctgtagcagatgaattaagtttaattctacaactgccatctaaagatattttgtatatattatttaaatcaattgaatgtgaattagttcttttaacataatatatccaattgccttctacaaacatatttcctactgcctcatttgctatgcatgtgtcctctgttccatctgttttaactttatttatactgtggtgaaaagcatctttccaattgctatagtaaatccagtcgtctacaagattaaggttccatactctatttggaattaattgtgtattgtaacttaaatcacataaatctttcctaggaggatcatttttccttattttgtacaaataatcaggagctgctccatagacatctcctaccctatttatataatatatataatcattatcttctacagccattccatcatttacaatattgcctgatgaattagaaatttttgaatcgtcatttttaggcacatctaagctattgtagcaagtaaaattgaaattatatattttatcataagctccatatgaattttgatctgctccattagatgaagacctttttacaaaaatcataactttatatttaccttcagttaatgcattattatcttctattgtaaattcattatatgcgggtattggatttgaatatccatcagttaattctgtgtaatcttcattttcactcctagctataaatactctatactgcactggatcataattgctgtagtcagaataatctccatcatacttggaactcatatttattttaatagtgtcaccatttagcactggataatgatcaactcctgcatattcgacatatggattttgcttttcaattgataaacctgaaattgtaccaaaatccgtatgtgagaaatcagtttctgttgtatcagcttttgcacttgtactacatgtcataaaaatcaatgatgtaatagtaatgactgagaataatctattaataactttttttgacatctatacatccacccctgattcttttttattttataaaatatttattgacagctctaagtgatgcatctgcaactttctggctgttaagtctatgcatcatcatctttgcgtcaccatcatcgcactcaacagtcgtttccataagcactgcggggcaccatgctgatgataacactgtgagatttggcctatcttgaagtggatatgtgttagtttttatggtgctagacacttctctcatgagtattgttgcaaattctcttcctggttttggagcagtagaattatatagtaccgtagtccccctaaacatataaacagactgcatgttaacatctaatgggagtgaattattgtgtatacagaaaaataaatctgcattcaaaagatttgctggatctgttctatctaataatcctatatttttatcatcatctctagttatatatatacgatatcctgatttttcaaggttttctttaactcttttagatatatccaaatttaactgcttttcataagtgaaattggctgttgctccaagttctgagcctccatgaccagggtcaataattattattttcgagttatctttaaccttttcttcaaatgtaacatctataaaggtcttaaattcatatttattgtcccctaaggaagaatatctcctttttacaggatttattttaacattaagtttttcagaagtctcaatatcaacttttgctgtattattatcaagcttatctagcttgatattctttatatacttattatcttttaaaactgaatagaaattatcagattcaccagtaacattaacctgtgaaataagtatttcaattttatttccatcaatactttcagaatacttaggctccacggtatattttctaatatctccagcctcagattctgtacatgagtaggatactggaattcctaaagctcctttatgttcaacttgataatatttaaaagcatcttgttgtaagtcataaactttgctatttccagattcagtcgtagtagtagtagtagtagtttcttctgcattacaataagaaacaggtaatatgaaagtacagactagtaaaatcccaaagactatacatttaaattttttcataaatacttacctccactacatttttttatatcctatatagattttttcattctattttttcataaatttgtgtagactattcatttaattacataatatttaatttattttacttttcgttcataatcttatacattcttaccattttctcaattaggacattttcagacatggcagtcattaattgatcttgcgcatgaaccataagtaatgttattttaattccttttccatttatctcagcttgaatcaattttgtctgagtactatgagctagtttaagctcttctctagccttttttaaaaattcttctgctttatcgtagtttttattttcagcttcatctagagcttcaaatgcatatgctcgtgagtcgcctgcgtgtgatattatttcaaatatttcttgctccatagagttcatctcctaatattatttattaaattgtggcaaataccctttgtttaatgaacacaagtcatcaaatagcttaattgcaatatctactgatgggactagtggattattagccagtgccattatagcttgatttgtattgccatgtactccagcttctattgttgatatctcataaaattttaaactgtgaattagccctaaaattttttcttctacaggtcgtgtcaaagatagtggcgtcgcacctctcttatctactaaacagttgacttcaacaacggagtcgtctggaattcctttaatggttccattatttttaacatttattgtatgaatgtcttttttatcattgtatattgaacttataagtgatacagctgcatccgaataatatgctccacctcttttttctaactcaggtggtttaacatctaaattcttatccttatatttttcaaataagcttgattcaattctctttacctgttctgctcttgtcccaatagttttggcggcctctttctcttcctttaacaatctatctgtcatatagtaatatctatgatacggacatggtatcattcctagagcatctaaaaatttctttggccattttaaatctgatatatttttcattgtaagttctgcgccatcttttaatttttctataactctatcagttacatttatgcctttataccatacatttcgtccccatactaaatgattaagtcctacatattctataaaaatatctttactgtccacatctaacattgaaactacatccatcttcatgtgtattggaacattacataggcctatacatttaatatctgtatatttcaatacagcttctgttataattcctgatggattagtaaaattaataagccatgcattagtgcataattccttcatatctcttgaaatatctagaattacaggaattgtcctaagagcttttgcaaaacctcctggaccaactgtttcctgacctaatacgttatactttaaagggaatctctcatctcgtgcccttgcatctaatcctccaactctaaattgtgtaactacaaaatcagcatcacttagagcctctcttctatctaatgtgagagaaattctaatgtctaaattagccttttcacacattcgctttgctagagctcctactatattaagcttttctttaccttcttctatatcgactaagactatttccttaactggaagttcgtcttttctctttataaagccttctattatttctggagtatagctgctgcctccaccaattattacaattttcaactcactcatcttgcgcctccaacttgattttgttatgcagtatttgtgcaataactgcataacaaatttaaaactataatcaatttttattaattattctccataccctctttaattaatttcttttcatatgcttttaagaatggaaaatataaagcagttacaatagctatatttattaatactaaaattattgctctccagtctccaccagttgctagataagcgccaataggtgctggcaatgtccatggtgccaaaataactggtttagatactaaatttaaagtcatagcaaagtatgatacacacccgcaaattaatggcccaagaataaatggtattattaataatggatttaacataattggagctccaaatatgaccggctcattaatattacagattcctgggattaagcttgctctagcgatatcttttaagtatcttgatttagagcctagcattaatattacaagtcctattgttgctcctgaccctccaatccatacaaaccattgaaagaacggctctggtgctatattcggaataggctgtccagctgcttgcgccgctacattagcatcaagcattgcaagccatattggtcttgcaacagtaccaacaacagaatctccatgtattccgcatccccataaaagtgtaataagtaaaattggaactaatattccaggaagtgaattacctgctgttaccaaaggtgtaaatatacttaacacaaatttttgaatatcaaaatttaataaatctcttataatccatattgggactataataaaagctgctggaataagagccgcaaaagaattagcaactgatgttggcacttcttttggcattttaatagttagatttttttctttgcatactctaaagatttctacagcaaaaatagacattataatagcagtaaacataccagatccgcctaaactagataacgataacatccatccgttaggatcaatatttaacggaacatttgtaagcaagaatgccgcaagccctaaacttccaccagataaaggatctagcttatatgattttgctagattatatgctattccaaaagctgcatatagggccattattcccatacttaagcggtatggaaacattatctgattaacatatggagcgactaattgctttagccaatcatttggcggaactgctattacgaggaaaaaacttcctattattattagtggaatagtagatactataccatccctaatagcttttaagtgcctctgctcagatagtttagtcattggtggcaataagtacttttctagccaattaaaaaatttattcatacttcctccttatcatttattatggtttttacttacaatagatctttatttgcttaagaactcttgctccaccaagaggcgtatatcccattggttcaatagcaattacttcaagactatattccttagcttgatctttaaagccatttagcctatgtcttacctgaggtgcaactaaaactaaatcatatttattttgctgaatttcatcctcaaaatcgctagttcccaccgctttgatttctagatcaaatccttctttatcagcttccttttttatcgcttgtacaacaattgcactagacattcccccggagcaaaccattaaaactttcataacaatatcccccttcaattagcaatatatttaaatgctgctttacaatatatgtattttagtactatccgtattattacccgcttttggttttaaattaataaagtttcataaaaaactcttatgattgaaattttgtttcatcaattagcaaaattaagatttgcgaaaaaatattaacaaataattattgacaactgataatgattattgttaacataaattaagtactttggaaattatattttaaatccatgtactttgattagataaatattattgatactttatggatcacgaaaggcggtaaaatcgatgaaagaacttcataatatagggtggtatgctagtaagatatcccccaaactacctaaaaatgcatttaaaccagtaccttcaaggctgtttggaggacttgcatatacaattattataatttgtggaatactcacaattactctatgtagatttaataacattataaactttttaatatctttagttttaggctttagttttgcatccataggctttcttggccatgaaattttacatggcactgttgtaaaaacacattggttaaagaacttgcttggagggatagcttttttaccattaagcataggtccaaacctttggattaagtggcataatatgagtcatcatgctaatactcaacatgaaataaatgatccagatgcttggatgagctttgagcaatttagcaatagaccgtttataaagtacatttataaacttcctttgtggtttcgctcactatttagtttctcagcattaagtatttcatttactcttcatggaactcgcatgttttttatatatgttaaagaatttaaaagacaaaaaagcataaaactatggattcagtttatactcccttggattatatggataggtttattcttcttagttgaaactgataaatggattttctcatatttacttccattccttataggaaatttcattgtaatgtgttatatatcaagtaatcatagattaaatcctcttgtacctataaatgatcctttagttaatagtctttcagtaacagttccaaagtggcttgatgttctacattttaatttttcttaccacacagagcatcatctatttccaggaatgaatcctaaatactattctctagtaaaggaagaaatattaaaactatggccagatagatatcatcaaatgcctcttttaagtgctttgaagcttctttggaaaactcctagaatctattataataacgaggaattaatagatccaagaaataaacgcatatatacttcactagaaaaaggattaaaacctaataagatttcttatcacaatctataaatagaattagagatatatagataaacaatatataacttatacttatgcaataatccaacgaaagtagaaacattgttatttcacaggactatgaaaatttcgctgaaagttctaaattgcaggttgcacaactaatgcttgctcccaatttcattgtgacaagcattagttgaacaacctacaattaaaagcttttaacatctcattttcaatgcctgctgcataaaaatgtttctactttctagtatggtatttattgcgaagtataaatcaaattcctaagttgtttatctatagataaaccaagtgagacttaaatttatgcatacaactcgccgaaattaataatatacttttgttccagtttctaggtaattctgatgggtgattctaagattaaaagccataaaattcctaatgaaacatttcacaaaagcataattcttatttctagttgtatatatttcatagtataaattattaagatttaattcgtcataaatattagattttgataaaaacaaagacttaaagtatctgttagttactttaagtctttgtttttatcattaatatgtttgctaattaaaaattttaaatatattggagtagagaaattttcatagtcatatggaacaaatatacattcactttcctctgatatacacataagttcgactctcaatatgcaaccccctacccatatacaatcaacattaagcttagatttatgcgatagctatctttactcaacatatctatattttttaattgatatagcgagcccaattaaaaaaataactactagagatatcgtgcttaaagtatatggaataaagattcttcccactccttcatgtggacttagcaagactggtgcgctccatggataaaatgctgataactgtgtatttactattactatatttgcgaaagtagctgaaataacaaatattatgcctggtaatacattttttgagtagatagcaactgcacaagttatgcaaacaagcataaagtgatatagtatcatctttaaaagtgctatgaaataatatataagtaaatccatatttaagctttcatgctttagtaaaaatcctaaaattattgaagtgaagaatactaatattaaagtaattgctataatataaagaatgcatgcaagcttagaaaataaaagcttcattctattaataggataagtaaacattacgttcatagttttggtttcatattcatgtccaaagatataagcagctattattccataaactataggtgctacaatatcatttaggaaagaaaatatcacatttaaataaccttcccataaaagtaatgaattatattttttattaaagccatatattataaatgaaataacagttggaataaatagcactattgtacagaatttgatctttgcctttctatacttaaaaatctctgctaaaacatatttcatcataaccttattcctcctgaaatccttacaaaataatcctccaaaccttccttatgtttaattaattcaaataactccacactattatttactagtgctttgcttatatagtttgttttcatttcttttccttttatattaagccttaaatagttgtcatcaattaatgaactatctaagttcaaattttcatttaatactttttgtgcttttttcacatcatcaactttaacatcaacatattcctcgtaactattattgatctcactcatcgaagcttcctttaataaaattcctttttctataataccaagcttagttactgtaagttctagttcacttaatatatggcttgatattataaaagtcatattttcctcattagcaagtcttagtatgaaatttctaagatctcttattcctagtggatctaatccattagtaggctcatctaaaattaaaagctttggcttatgaagaattgcgcgcgctataccaagtctttgtttcatacctaatgagtactctttaacttttttcttcttatcatttagaagatcaaccttatctaagcactcatctattatgctcttgtcctccaatcccatataattagaatgaagttttaaattctcataagcagttagattttcataacacgatggaaattctataatagatccgatatttcttaaataagaaatatcctttttattaacttcttttcccaaaaccgttattttaccactagttgcaggaatcaatcctaagatcatctttaaagtagttgtttttcctgctccgtttctccctataaatccatatatgtccctttcctcgatattaatacataagttacttacactcaattgtgttccatactgttttgttagattatcagttttcaatatataattcatattaatattcccttcaaattgtattaaatattcccaagtaaaatagaagctgtttctaagcatgctccaatcccattatacccctaaataacaaaataatgtattaatactttataagccttaatttgtgagattcatacaatctctattatcatcgacgaacaatagacaatgataatagagaacagtcctttctaactacgagataatcatttaaaagccgcgataagattttattagcttatgcaaacataacattaaaaaaatttaataataggaatttgtgatagtttaattactaaaaagtgctcataaatcagcatgcattgaaatattcttaaaaagtaaatgtatgggaggtagatttaaagcgattgaacgatattgagaaagataataaagtttagtttattctaattggtaaccgcaacaaatctaatgaagaaatttgactaatttggacatttacaattaatgcctaatataatatattactatctataccaatcaaggcacaatcaaaaaaataataaaccagtatacttgtctatttcgcgtcatactgtgtcagcaaatttagctaataaacctgctatgagcttaatttgcttccttatctgacactaaatattcagcgcatctttgatctattattttctttcatgtgcctaaacaagtaaatgtctaaaaaaaagacaataaatttatggagggaattttatgaattctgaaacaatatcaattctaatttatgtgggtattggaatcttagcgctatttatattactctatggcataggatttacaagtatcggaactgatgaggtaggtatagtagaaaaatggtggagtttaaaagggtctgtacctgctgatggtttaattgcattgaaaggtgaagctggttatcagccacacgttctaagagctggagtgcattttaaaactccttttaagtacaaggttaagaaagtaagacttgtaacaattccacaaggacagataggttatgtatttgcaagatctggagaaagtcttgctgatggacaaactttaggtaaagttattcctgagtgtaaatcctttcaagatgtagtagcttttttaaataatagaggacaaaaaggtcctcaaaggcagattcttcgtgaaggtacttatgcatttaatctagctcagtttatcataattacaaaggataaagtacattcaatatttacatcaaaggatgaatcagagcaaatagaaactatgagaagtgacttacttagagttaatggattccttcctgtagttatctcaagctcaaaaaatcttgaacaagatgaatatggaaataatattaaaactaaagatacaattggtatagtaactgttaatgaaggacctactccagataacggagctataatcgctccaatagttggtgatggtattacaaatgaatattaccatagtaacttccaagaacccgaaaaattcttagctgctggtggtagaaaaggtaagcagatgcaggtattaacagatggtgtttactttattaataggttatttgctaatgtggacatagttccaaaaagtattatagatattggttatgtaggtgttgttgttagttactttggtgaaaaaggtgaagatgtatctggatcagattactctcatggagaacttgttgagcaaggcaagaaaggtatttggagagaatgtatgatgccaggtaagtatccattcaatacttatgcaggtaagatcatcccagttcctactactaatgttatattaaaatggattagcggtcaggttggagatcataaactagatgataatttaaaagaaattaatcttataactaaggatgcctttgaacctaatctcccacttactgtagtgtttaatattgattatagaaaagcttcttcagtaatccaaagatttggggatattaaacttcttattgaacaatcactagatcctatggttgcaggttatttcaaaaatattggacaaactaagactttaattgaattggtacaagatagaagtgctattcaagaacaagcttctaaagaaatgaaggaaaaattcaaattatatgatttagaattacaggaagtattaattggtacacctgctgcttcttcaacagataagagaattgatctaatccttgcacaacttagagatagacaagttgcattggaagaaattaaaacaaatgaagcaaaacaaaagtcagcagaaaaacaaagagaacttaatgaagcaattgctaaaagtgcagctcaggcagcgcttactcaatcaagtatcgatatagaagttgctgataacaaaggtaaatctgaattaaaacttgctgaacaattagctttaaagactcaaaaacttgctgaagctgataagtacaagagaactcaagaggctgatgctttaagatatacaaaagaagctgaagctgctgctaacgctaaagctactgaacttaatgcagctgctaatgctaaacaagtagaattgcaagctggcgctgaagctttcaaacttgaaaaagtcggtgcagctcaagctttaaatatcaaagctgttgcagaagctactgcagaacaagaaacaaaggttggtcttgcaaaaggtactgctgctaaagccttagttgatgcttatggcggtcctgaattacaagtacaacaaagcgtattaactgcttttgcagaagcattaaagataagcaaatcccctcttgtaccacaaacagtaattatgggtggtgctgatggaaaaactcctaatgctatggaaggaattttaagcatgattttagctaacatggctagtgctaatggatcaatagtaaatactgttacacctgcacattctgatatagctaatcaatcagataatagttctactaaagaatcaaagatagctaaaaagaaagataatatttcagccaaggaacctgaagtataaccctatttttacttctagtattatatagataaacaacatatgatttctagttgagatacgaatttaaattcttaacaactttataaatacgtttatctgataagccaaatatttaaatttcatatctataaaaacgagatgtatctaagtaacttttaaagttattttgatacatctcaatttatgtcaacagaatattctaacaacgtatacttatttaatctttatatttgataacatatgagtctttatataaaatgcatagtatatatttttcctatgaaaataactctataagttcctcttttgaaaggcttccgagcgcgttttcgctcttataatcactctcaagaataccattaataagttcttttttactttcttgaagatttataattctttcttcaatagttccttctgaaattaatttaaatacttgaactacattcttttgtcctatcctatgtgccctatcagtagcttgatcttctacggcagggttccaccacgggtcaaaatgtataataatatcagcagaagttaaattaagtcctgtcccgccagcttttagtgaaattagaaataccttgtacttatcactgccattaaattcatctacaagttcagacctcttagttgcttttgtacttccatctagatacatatgctcaattttattttctgataattctttagaaatattattaagaacagaagtaaactgtgaaaataaaaggatcttatgtccattagctatgttatcttctataagatttaaagcttcttccaattttgcacttcctcctgtgtatttatctactactatggatgggtcgagacataattgtcttagctttgttaaataggaaaatatagttatcttatccctttcaaaattttcagcttccattttttctttaatatcttttacataggaagcataaactttcttttgttccttttttagttctacataataatttttctcaattttatcaggcaattctctaataacatctttttttagccttctaagcatgaaaggtcttataaatttttgaagttcaattgtagaactgtcattatctataaattttttcttaaaaaacgttgagttatataaataattaggcataataaaatcaaaaatgctccacagctcaattaagttattttcaaggggagttcctgttaatacaaatttgttttttgcttttatatttttaacacattttgtactttgagccaaaggattttttatattctgaccctcatcaaggatacaataatcaaaatgtaatttttcataattttcttcatcatttcttaaagtaccgtaagtagttagtaccacatcatattcatctatgctttctatgttttttactctttcattcttattaccatggacaacacatatcttcatagatggcgcaaactttaaaaactcatttttccaattatatattaaagaagttggggcaattattaaagacttcttatctttttcagatagtaaaaatgcaatagtctgtactgtctttccaagtcccatttcatcagccagtactccaccaaaacctaaataacttaaattcttaaaccacttaaagccagttatttgataatctcgaagctgcgttttcaagttatccggcataatatattcaagtttatctaattctaaaaccttatttgcaatgtcttttacaacatttttaccttttataaatgataaattgctattttccaaataatcatttaatacaatagctttatttttgtgtaattttatttttccttccttattgccgtttgtaatgctatcaaccaaggtaagaaaatcttgaatttcttttccttcaagattaataaaactgtcattttttagcttataatactttcttttattattaaaagcctctaaaatattcttatattctttaggagatatatcatctatttcaaaattaaaatctaaaaagttatcttcactctctttaatattggcctggattttaggtgtatagtagactttcctctctctaaacctatctgaataataaacatcccctaatgcttcaagttctttatatttatctccaagaaataaatacaaatcatattcatctccatcatattcaaatatattatccttataattaaaattgaggttagttaaaacttctaaaatactttcttccttatttgaatcacgtatgatgattttatttttattctctgggccagaaaaatattttaatttttcttcaccatacattaagtttacatctaaaactatctgcttctttcttatatccaaaaagaattcagctattaaatcattttttaccaagttatcaattttttcatctattttaatattagaagctataacttctaattttggcattacttcattaaatatatctaaagccgcttcttttttaaattccagccttttgaaatttttaaaatactcgtaaaatatcttaagactctcaatttgtgactttgatggcaaataaatatttttattaaataaaaaaacatcatatttgctagttagcggtttaaatgaatcctcacttatttttataatatatttttcgttattttcaccaatatccatttctaaaggaatattatcttcaataatcttaactttttctaaatcatatgtgatatttttttcttttactatatgtaaaaaacgtctaagagaaacatcattaatattgagatatttaccctcaattaatccactgctatatctatatgttatttcatcgttagccacatattcttctataacccccactatatcttcatcgatttcgttaaatatattcaccaatggattataggtaaagtcttttccatactcaatattttgacctgcagttctcgcttttataaaatcttttacactttttaatacatacatttttttgtttccaattttaaagtctgcttgaaaatatccactagttttcttagagtttaaattaacctctaatttaattttctcttttggatgttttaaaactttaagcttatttaatatatcctcccccatattttcggctttctttgcaatctcttcgtttttagcttttcttgcagatatatattttgacaataccgcacatatatgtttacatatatacttatttcttggggttgtattattatgaaaatctaaacaatcgcaatatgtaccatttatttcgctagaatttccatctatcagcacctttacatcataatgagaataacttgtttgagagtaaacttttgaagtaatctctataagttccatttccctatcaactacttctcttaagttcaatacctttccagccctaactaattcgtttcctttttgtttttttagaaattgtatttttccttcaaaattctcagataattttttaatactaaaattcataactcaaatcaattcctttaatttaataatctaataactataattattgccctacttatttatatacttacataaacatttagaacttctgttgttctttttataaattataaaaacatttttttattatatcattttatttataataagttaattatttgctattttcgtttataaacttttgaatctatgatacaatcaattataaaattgtaaaatcatttggattatatgatttattataggcatatgaaagaaaatatacgagagttatgacttgttattttatgaataggccttacactggagggataaacatgaatgagaaacaaatagaaatgatgaagaaattaatagaagaaaagaaacaaaaaggaaataacactaaaaataataaaagacctaaaaaggttattggacgaatgttactagataatggtaaaacaactcaataaaacattattattctaaagaggataatgtaaatcgaaataaatttactttaacttcttataaaaagttcagttattctttcttcaacaagatcttattgatacttctgaagtcggaatagctgggttactatctatataatagatagcctgaaactcttctaaagctctctgttcataagctttataaagttatcatgtttcattagtattgaaaagtaaatgcttgaaccagttaagaaagtgtttgccattggtacaatacttaaaattattagactcgcaagcacctgccattcaagtttattacttttaaagtctatttctttcttatttataaatactctgataaaaaataatactagaaatatgtagcttaatactgtagatattgaatatagatattccattttatcaagtccttttatttattttttatgtacattactattgtatacctctatttaattaatttccactaaagttacatttttatagttattttttattcatcttacttgcaattacatgtgagaaaaatctggactataagaaagcactgcgcgtatatgactttagcacaatgcttttataccgaaaattatattaaagatttaaggggatttcttcgtacaattcatctctttcatctgagtaaagccagccttcatcttcagcataatcaaatatttcttctaaaagtatattgtattctttagcaaaaactgctggatttcttttatatttatcaatcgtttgttctgggaaatcgttctttctcatcttctcttcaagcacaagtgcttttaaatatgtacttcctatgagttctctaatcacattatatctataacttctcgcactacagatataaagcctgcatattactggtctttctccatatatagtgcatagatttgtttctgttatgaaattgcaatcagttttcttatctaatacgtactgatcaaaatccctatagtaatttctctttttaactaacttttcttgcacaaaattcgaagctgcttcattatcccacttacttagtttgtttacacatacattatccatttccacagaccaagactttttacagcagctctcctcgcagccattacaatcaagaggattattatttaaaaatatatcaattgcatctaacacatctttaactgttgtatttttagcaattttatcataattcacttttccttcgccatcaaatagtaatttcattttatagttcctctatttcaaattattttttcttaataaaaagagcctaaagcagaaaattttaaaaaaatactttcaactttaggctaaaatttttagtctgttaatattcaggtagttaaataataactacctgtaaatttttaatttccccaagaatgcttccgagacacaaaatgcggaagtcgctttttttgtaagtaaaatagttttatattataatagttaatactattagtaacgctataatttattacttaaactttctctttctagcttcttctgactttttctttctttttacgcttggcttttcatagtgttgtctcttttttgcctctgaaaggattccagacattgaacatttctttttaaatcttctcaatgcttgctctagagattcattttctcctactttaatttctgacatacttttatccctccctccggcgctgtattgtaaaccacattaatagtttacaaatataaactcataatatactatacattatttactaaaatgctgtcaatgccctaatagtttagtaataaagtcttatgatacttctaagctagatattctgtgggcctctgcactttttaatgtatataaaaaaaatctgacaggtgaatttatttttttattctcctgattgaattcaagattatttgaaaatattgttttataatttacctacagatttaattgcattatatttttctacgaaaataaaattattatactttgtaaagattttcctttcaggggtagttcctaaaatataaaagaactcccacatagaatgagagctctttttacgaatcgaaaattaagagatttatatcctattaatttcaagaattaggatagtcagtaactgattgtttcatattaccagattttgctgtattacctgtattatttactacatgtgttatctcaccattaccagataaatatacggaacatgcatggtgtactttaactccagacgcatttggaacctctattccattattttctgatactacagcatctctaaagtatgagtaaattcctgatccaaaaagctgatgagaagtaactgaatcagctaccttgtaagaagcatatccgttttgagtaccattattgctcatccaagatgcttgatttggaacatcatatggtaattcactttgatagaagtatacttttccgccattaccattccatatagtttgatactccttaaaatgctccacaaacaatccatatagtgtaacattattaccatttacaataacaccattttttgcattgttaactgtccagcctactcctgtaccatgatccgcacgccatacccagaaatcatcgcctataacgttattactatttatttttaggcttgtatcagcatttcctactgctgccccaccaattctaaagaataaatcacttagacttgtaggattagctgagtgatcagcggaacttccatcttgtccaactttcaataatactggtgaattctttgctccagcatcaaatagaattccagaaacctttactccgtcaacatctgaaatattcattgcagcagtaccattgtctgggatcaaagttgcaagtccaagacctaatataactgtattagactttgttacatttatagcatcactaagatgatatactccaggggtaaatataatgttctttccttggctaagggctgcatttatgctttcagctgtagatgtatctggttttgctatatagaactgatctataggtaatgatgtaccttgtcctagaccatttgcccaagttatcccttgagaattcttcctaagatcaggaacaaaaacttggtaatttccactatcatcaatataaagaaatggtttttctctaatatctggtgtttgactgactactgtatctggtgttgatggatatgcattgtcatctgtaggtgctccattattccccacaaaaaccatgttccagtttgcgccattccaagaccccatttgactgtttctagtaaagaattgttgttgtgatccagaagtaattgaattatcaatctttgaatcagctataaatccaccactagaccaagctccatcataattagttccaagtgggtcccataaagacaacccacctttaatgtgaacacgtctcattggtgcagcttgtgatactgcccaagttaaggtgcctgctggcgctaaattattagaagaataagctggagtcacagcaacattttcaaccgatctccagaagttacaagtcgcatttccacccatccaatctgcttcacaacgtactgcaccagttatattaacagcatctggtgtctttccaagtcctaatacagacgtaaagaaacctacatttacatttacgttatatgaacctggcttaaacaaaaaggcatatctttcatttccaaactgatttgtctccatcttactaaatacgctatcaacagtattttggatatcagaacttggcattgatggatcaaatattttaacatttggacctaaatctacattatttactgtattaccatctggagtaccgtatacttcaaattcccatagagagtacccatactgtgtagttcttgctgttccaagcattcttatatatcttccagttgcagtagaattaaaagttatgttttctactcctcctgttcctcctgtttttgtataagcatctatccaatttttattatcagttgatacttgtatcttataatcttttgcagcagcagtttcccaatttagttttactcctgagatattataacttccacctaaatcaatagatatccattgaggatcgctgccttgagcagactcccacctagttcctgcatttccatcaacagctaaagaagcagtatttccacctgtaactgaagatgaagttgccgacttatttaacgcaatattagttgctactgctgcactttctgtagatgcatctgaggtaatttcactgtttgctcctaaacttacagtttcagcctttgtgataaatgaagttgacataaacatagtagtaaagacagccattgaaagagttaatgataaaattcttttatttctcctaatcattattaaactacctcctaaaaatacaatttaaccttatattttgaatatttagcttcttaattaaaaatactctacatgttttgttgcaacaaagacattaatttacttaactgttttgaggttaatttttatattttacttcactaatacccaatactaaagcgctttagcattaagcatgatgaagataaatatcgaattattaaacttattaagcttaatttatttaattaataactggaagtagtttgtgtgtcaagaacccaattgaaacgtatacataaaatacttccttttactagacaacaagaatttggcttattagatatctatatttacaaagttgctaaaactttaagttcatatcttcactagaaatcataaatatatttgtaaccgcaagggtcataatatggagaaaatatttgataatgagctatcaataatatttctttattcattggtgatttcattataaatgagaattttatagttatgtaaagaattatttttatgatatgatgcttgtgatgtgtatgctttactttatatcttgataatactctgataaaaatccaaagtaaacacccatttctctaaacgtatatattttagaataaaacgtaaatctacagtgtgttttttgtaaatattctttttattcttaaaaatgtgtgtttaattcttataaaaatgcaaaagccatccatttcactggatgactttctataaggttaatataacttaaataatttcactgctgtttttgcaattttatatacaggtgtttcaagctctctgcttgcattcttaagttcttttcgaatctctatatgctgtggacaatgcttttcacatttaccacattcaacgcattgtgaagcactgcttggatttttacgtactgcagtacacattagataattatgcctgcctgactttttattctcagaatacataagattgtacgaatgaaaagttcctggtatatctacccccttaggacatggcatacaatatccacaacctgtgcagccaactttaatatttctatttagctcatttttaatctgttctattaagtcaaaatcttcttttgtgaattcattaatctcaacattgcttgcaatatctatattttcacgaagcatttcaagtgagttcattcctgataatacgcatgtaacctcaggctgattccaaagccatctaaatgcccattctgctggagtacgtttctttgaattttcctttattatgttcttagctttttcaggtaataaattaactaatcttccaccacgtaatggctccattataattacaggaagaccttttttattagcagcctttaatcctctttttcctgcctggctatgttcatctaaataattatattgaatctggcaaaagtcccaatcataaacctctagtagctgaagaaaagtttctgtatttccatgataggaaaagccaacattacgaatttgcccattttgaactttctcttttaaccaatcatctgctcctaatgcttttaatctgttccaagtctgcacatcagtaagcatatgcataaggtaataatcaacataatctgtttggagtcttcttaattgttctttaaaatacttttctaaatccttctttgacttaaccataaaatgtgggagctttgttgcaataaatattttctctctacatttatttctttttaaaatttccccaagtgtagcctcactacctgggtaaacataagccgtatcaaagtaattcacaccgttatttattgcttccataatttctttttctgctttatctatatcaatgctggttccttttctagtaaaacgcatacagccataacctaatattgataacttatttccgtttttatcttctctatatttcatttttgaagattcctcaacagaatccatcattgcaaccacctcatcaacaatttatataatatatgtatattataacaaattgaactttttgccaatagcagatctaatattctttcgttaagcagaatatggtaaatctgactctaaaatataattgattgttaattaattttggtctaatattgttgttacccctcagtaaactgctttaataataaataatacatttgaaatcctagtaaagcaaatgctgagtttagattaagatgtagaaatctaattactgtataatattaaataaaaatttctaagacaggagaatagaaaatgaaaactaaaagaaactatggttttaatgactactttgagttgtttttatatgctcttgctgtaatttgttctatttattttcttattaggggcgatatgcaaagaacacttcaacccatattaataatcctagtgttaacttttataaaagtattaataaataaaagtagaattccaatttcgactggtttaagattttctgttttagcatttatttttgttactatgttttttgctaacgaatttaaaggttattcatttataccttatcttgataaaatagaacatctgtcgtcaggggttatactcttctatataggttcgttaatattggagcttataaataaaaatgaaacaaataagcttaatgtgaaaacaatcattctttttagccttttctttgcaatagctatggctggagtttgggagatttacgagtttacaactgatagattatttggtcttagaagccaaaataatagtctagtggatactatgggtgacattatctgcggaagtattggagctctatttactagcatttacgcttacaaaaattttaaagtaaactttaaagtttcatcagaagttattggtgattctgacaacttataaaatagattttaattatatctttaagataaatagtctatatttgcacattaattaaaggcgtctagtaaatttagacgcctttaattttttcttatagattattattaatattttattttaaaaatattatctaaattctgttgttccatcaggatattgtgcaaatcttcctttttctcttgggtgaacaaaatcgtcacgttcccatggccagcccccaaaaccagtgctcttatagtctgcaaaagcatccataatttctttatctgatgtcataacaaaaggtccataacttacaactggctctccaataggttctccttctaaaagcagaatacagctttccttagcgccattttctatttttacaacttcatcacctgcaagttttacactattataaacatcaatatcagttccttcaatccttattgtctctccatcatagaaataaatagttctatttaatgttgaagataccttttgaagttctatacttgcttcaggttccatacgtataatacatattcttacatgattattatctttacttgcccatgaattaggcgaaggttctaggctcttagtactattataagtacctgaaataattcttacagtacttgtttttccattattgtcttttgagtttataacaggtatatcctctgcccaaagcattttataatgtggttcaacgaatttatctttcttaggcagattgagccagatttgaaataattctagtggattttccttttcagtattaactaaagggaacatttctgtatgattacagcctctacctgcagtcagccactgcacatcattagctccatagcgtcctgtagcaccagctgaatcagcatgatcaacatatccatctagaactattgtgactgtttcaaaccctctgtgaggatgctgagggaatcctggaatggtatccccatgatacatattccatccatcaattcctctaaagtcgttgccaatagttctcccatacaaagaagcatctggtcccatctcactattaccctttggataagcatccttatgatgtgcacaaaatataaaaggatcacttgtctgccactgtgaacttagcttgcttattttaagtatattattttttcccatttcgtaacctcccttgatacttcatataatttataaataatctttaataattcccctataatatcaatcaagttagaattatctaattctaaaaaaaatattgattaaattttctccattttattatgtgttacttttataaatccaatgagatttataaaagtaattaattgataatgattattatttattaacaaaattatagcatagctttcatgatttgtatattgcttctaataatttattgcattttattaatacgtagtatataagaaaaatttctttactgtgtatatattctttgcaaagtccgtaagtctatctgaaatattgagccatttatatttaataaaatgaattgagaaaaatttaacaatgaatttcacgctttttatgcaatatcgtaaatgaacaatattactatagaattattttatattacatattattaatttttccttctaaattttaatgaaatagcggtgaaactcatatattaatatttttcaatactaatattatcttattaacttataaagtaaaaaaaggttattaaaggtgataaataattaacaaaattgctcgaaaaacgttgattaattgtactgtatcctatataattatctttaaaggatggaaaaataatcttttctccaaactttaaaataatattatgaaagtgagggtatcatattgaaccaggtaaacggaacgaaagaatggtctaatcctagtcccgcaggcctagttgctttagcagtagcaagtttctgcttttttgccttattatcaggaagagtaacaagcggagccttaccacttcttggatgttggcttattggaggatttgtagtacaagttgtagttgccttaattgatttaaaaggcggtaatactactggtggaaacacatttttattctttagtgcattttttatgttaacgggtggaattgaaatgctcattaaatttaatgcggtaactaacggaatttccctagatacgcgtatggatggttgggcatggttagtacttagtatttcacttattatgtggacacccgcattcctcaaaacaccattagtgttgtcgctaatcattttagctttagatctatcttcactctgtatttctctaattgatttaggagtattaccaaagattttttcaaatatacctgcctttggattattaatagcaggtattttaggaatttatcttgcagctgcaattattgttaataccgcttttggcagacaaatctacccttcaccaggtccaattattaaatagatatcgtcactttaactatactactctatttatcaaaaaagtaaatgtatacatagaacaaaatctcaggttcaacagtagcctgagattttttatgcgtctactttttcaaacatatgtgataaaaatctagtatacgaatatattttattttttcttctactaaaacttaactttccagttattaggtttcataatccagacctacaatgttcacaaattatctaaagatataatttacacgaaaataaaactatttttattatactttttaaagacttttgccttaatgagaagtttctatagaataaaaataaagactaaaatcctcctatctataaataatattagagaactttaatctttattggtttttcttctttagaagacatcttataggtacacaaaggatgcaaagctataacaatatctcagtgcccaattaaaattcaacttactttaatgcatttaaagcagcttcgtaatttggttctgatgttacttcctcgcaatattctacatgagtaaccttgttattttcgtcaactacaaatactgctcttgttagcagccctaattccttaatgtaagttccgaattccttaccaaagctcctatccttataatctgataatgtttgaactgcatcaatgccttgatttccgcaccatcttccttgtgcaaaaggtagatccattgatactacatatatctttacattgtttaattttccagcttcttcattaaatttccttacttcaagatcacatactggtgtatctattgatggaacacttacatatgctctctttcctgtaaaatctttcgaattaacagcatttaaaccattatctgttactacgaagtctggtgcagtatcaccaactttaatttctcttccttctaatgttacttcatttccttgaaatttaactttcataattcattcctcctaaattattaatattatattttaactattttcttagtggtttatcaaatatttttctgccccatatatactaacggctccatcagcagcagctgtaagtacttgcctaacttcttttgctctaatatctcctatggcaaatataccatctacatttgttttacagctttcatctgcaataatataatcatttttatccaaatctaccaagtctttaactaattctgatgatggatcacttccaattgctacaaaaacaccattaacttctaaattatctatcttaccatctttattatttttaatttctataccacttaatttttcttctccattaagttttgtaactccactattccagattatttctacattatttgtttcaaataactttttttgtgcagatttatttgctctaagtgaatctcttctgacaattacatatactttttcagcaattcttgaaagatgaagtgcatcctctactgctgtatctccaccacctacaacagcaactactttttttctaaagaagcctccgtcacaagtagcacagtatgatacacccttacctgtaagttcttcttctctatcaattcctaattttttaggctttgcacccattgataagattattaccttactttcataagtattcacaccagttataactttttttatatctccatcaacttttatatctattacttcttcatatttcataatgcttccaaaatcttttgcatgttcatacatagtattggcaagttctgaacctgttatgctgcgaaaaccaggataattttccacttcatttgtagtaactatctggccaccttcatattgtttttcaagcattaatgcatctaatccggctctacctgcatataatgctgctgtaatggcagctggtcctcctccaattataataatatctttcatattaccaacacctctcctaataatcatttatatattctttgataatatacaatttataaaaatttcaataagttgttctaaattaataattaaattttataaaattaaattttgttatattgtattttataatattatattaactttattgataaaattagtcaactgtttttcaataaaaaaatttgatatttattaaaaaattattgtgtatagataacataatcataaactatacttagactatgaaatatctttcaatcagaaatcataaatatattttcatagctttttggaacaaaagtgtgttattcatttcggtgaggcacactcataagttcaggtattagtttagttatctataattcttagatattttcattattcttattctgagtttaacctctttatgtttaaacacaaaaaatatataatatatatattgcaaaaataatccttcatcatgattctaaaaatattataagaattttatccgtaattgtgaattgtgaaatgtgcattgtgaattgcaaaatatatagcaaaactatagcctaggtctatacatataactcaccgaaattagtaatataattttatgataagtatcttaatagtgtttcgaatcaaaaatatttattacttcagttgatttaaacataagcctagtttcagataggagcaaataagaattatgaattttattaatcattttaaaactataactaaccataaactattagttatgaaatattgttttaaagtaggtttatataagcaaggattacttcatgatctgtctaaatattcgtttgtagagttttcagctggaataaagtattataaggggtatgcaagtcctaatggtgttcaaaaagctgttgaaggatattcatcagcatggttacatcataagggtaggaataagcatcatttcgagtattggattgattatggagtaaatgaagcagaaggtcttaaaggaatgaaaatgcctgttaattatgttgtagaaatgtttatagacagggtttgtgcttcaaaaaattatttaaaagaaaaatatactgatgaaagtccccttagttattacgaaaacagaaaacattattatgtattacatgaagatgtacgtgctcttttagaaaatttgcttaataaactcgccaatgaaggagaagacaaaacttttacatatgttaaaaacaacattctgaaaaatacagaaaaattttacagtaaaacactctagtttattttagttttctttgatctgccacccaatatgattatagcctattataagcctggatttgtagaatgcaaatccaggcttacgtttagatgtatttttccaaccagtttgtgatagcttgggattgttcctctgtatgaaaatcatgttcacttccaattgatacggttaaatcgcaattaaatttttttgaaaaattatctataacctcatgactttgcaaattatcttctgatccataaataattgcagtaggtatattccatttattaattgagtgttcttttacatagctgtaataatcccatgaaagagtttctattggtgtatatatttccttttttgctctaagtaggtcctctgtaacattgaaccatttaaacattttgcatataagatgctccatatcaacaattggtgattgaaataagcatttctttattggaaggttcttatatgcgtgcaaactgaaatacgcgccaagactgcacccaaataagttcatttctctccaatttttttgtatatatgctccaattttttcgagatcatgtactccattccaaacattgcatagatagtttttatctttcctttcaccatgttctgggagatcaaaactaagaacctgatatcctctttctgatgctatctgtgaaaactcatgtgcactttctttgctagacatttttccatgaacaaatatatatattttatctgaaggttctccccataagatcgctggaatattatctatttctattttactggtggtttccataatggcgcctccataaatgtagtttcttttatattaggaagaatatcatatatagagcaattcatctgcttttcaaaataatctttcatttcaaatgttgcattccaacgttctactgtaaatggaaatgttccatagcgtcttgtagtattaacaaatcgcttttctaacatacaaaatccttgagcgtcagcaagtgaatcacaaagaattaataatctatcatagtcatcataggttaaatcattaatatattttctaacaaattcactttcttcatcactcatatcattttgtcctatttctttatcaaagtcaggaaccggaaatgaatgtgtcaaacaaattcttcctacttcatcccaacccttttctaacataaatttatatccatcaatgccatgtcttcttgcgcttataccatatcttctacctatatcatgaagaagtcctagcacataagctttgtctgaattaagattactacatttttcagtaataatttgtgctgctaatccaacatttatagaatgctctgtccatggtccttgatttaattgtcctgctatttctaattctttttcagccacttctctacttggaaacatattatcctcctaaacgtatcatataaattctaatttattatcctgatttcagttgcttaaatcactatttaatactctatgaatatgatgtttgtttataagtaaattatagcatgttttgtaaatgttatactattatgttttctagtagtacatttttatttactgcatcaaatattaattagatcatttatatttatcgctaaatacaccaaaaataaatatttaatcctctaaatttttagattatattatttctcaaaagcttttcaacatctctgagccccgatgtttcctataaattgttaactttttttattcttaacttctttgctttttttcttcttaaattcgttcatttttaaattgtaaaaaaattttatttgaaactatgttcctttaaaagaatgtttaatggaagctttcaaaatttctttatttttaacaaggtttaaattatgctaaatcatataattatatcttgaacttattatattttttaaagcctaaatataataatatactaagaaacaatattccaatctcaattaagtttccatctgatactaagtatgctatacatagcaaaggaataaatattattatataagcaactatatgtatagctttccatacagaccttctttcttctagaaacttaattctaactaacctatctatgtagattgtgcttagaatggtaaatataaaaattataataaaaggaatcatgttatacctccataacaaaactttaggccttatgatatattgcatgaccactatctcccttaatttttgagaaatatatatacactttactatattttgtttatttagtacaaatacatttattttttatatagaataacattcaaagtaagttatattacattactctttacatgtacgtatgcttctttataatttggtaaaaataccacaaacccatttctgaataatgtgatattgaaatctattatttatttttattaatttacgtaataagtaatatttaagtatctaaaaaatctcctttgcttttattatataaaatatctcttcgaaacaagaatattaatgagagagttattatagataacataattagttctatatattctgtacaaaataggttttctgaaaaatttggtgataagtaaatagagtagttaaaggaaataaatctcgtaaacttatatgagttgtctaaaaacaatatatcttcggctgtattatagaataaatgagctcctataacgaacatcagcgattttgtctttattacaatagccccaaatattattcctactagcatagcattaatgattcgtatccatgtatgagatagtaatgaatagttatgataatgtactaatccaaatactagtccttgtaaaattatcgccagtaaattaggaattttcttaaatactacctgcataagatatcctctaaataatccttcttctaataatgataccccgaaaaatccaaagctgcttactaaagtaaaaattatagtcttggctatacctgatttatctatttccaataccatcttcccgcaagtaacacctattaatcctaagagtgacttataaagcaatgccacaataatccccaaaaataatagtttaatatcgtgttttttatgcttatccaatatagtggtgtataatttttatcgaaattaacctgaattccttttacaaataatacaagaattataaacaagcctatattaataaatgcattcactaacccatcaataaccattatgtcatctccaatttctgttgaatagattatatcttttataatgttgttaatgtaaatttctctgctattatctattaattataacatattttgtaaatagttatattcaattttcaattaatatttttatttgttactatggcaactttaaatttagagattttctaaatttttctgctgctctacttaatttagacattatttgtcacctcatttcatctagtggacgcatcagatcagaatgcgtttttagaattagataataaaaaaatatcacactattcatacattgtcttgaataatgtgatattaaaaacatatatcaactttttaaagtttgcactaataaaaatttaactttattgatttcatgttacaattcataatctttctagcatatcatgacctaagttcctaaatacctcacaatatctttgaaatccatcttgtcagatgatataaatatttggcatgtagtccattcttacttttgaatacataatacgctccaagccattatctacgactgtatgattgcttaaagccacatctacttttttacgcattgcttcactgataaaataatccaatgatttgagatattatttactaattggaaagcaaacctcagtaacaaattcttctggactcttaacgctttgaggtccattcaaataaatatcaaaaggcgcccctgcatattcatagccattatcctcaatccattttacaactttagcataagcttctcccagccttgaataaggcccaacaaaagttgtggatgcaaccagacctcctgcaagttcttttatattttcatttttctctgcatttactctgctatttactggaacacaaacttcacaatctgcattttctacatcaaattcctgcttatcatgataaattgtcattactggccccgatggcttaagatccatcttgaagatgtcctcaaatacctttcctataacactacttatattgctcatacttgttattgtcctcctgctgataacaattaatgactttctgtccttcaattcaacttttaaatccttcttagcttccataatattacctcctaactcaatcttcttaattttttgttcaatagaattcttaagtttcaagctgttttgaacttccttattaatcccagcaattttgttctgtaaaaactttttaagtaagtccacatcttccttatccataatagctttaatttcttctagttttaagctatattcttttaattcagatatagaaagaagttttaaaacctgttcatatgcatagtatctgtactgagtatcgctgtccacatacataggttttaacagattaatctcatcataataacgaagtgtcttagttgaaactctcccgattttagaaaactgcccaatagtgtacacaattaagtctccttcctgtcgacaatcatagtataaaccttccagttaaggttaaagtcaagaggtaattttattatttatattttaattttatcttataaaaaatatttcttgatttattcattatataattttcaccttatatcatttaacttcattaaaactcaatatttgtaatcttaccattaagtctaagcttatggatatatttccaattcaatctactctaattaagtatataagacaatattctctttaacaacacatatactccgctcatatatttcatttaacaaataaaataaaaaaattctcaatttgttaagcaaatgtacaagttaatatattaaattatatgtaacaggttaattaaaccagtttaaaaagattgtgagacttttataccataattccaataatagttttaacaatttcaaatgaagaaactgctataataaatgcttttactaatgcaaaataaaatttaaagcatattattttaaggtgtcagatatgatttaaattgatttttgttaaagaacatatcatttattaataatcaggcataatagatgaaaagattgtagaaatatttatataaacaatttactacattttaaaaaataaaagagagagcatcgtacaaattaaattttaataagtacgatgctccttttatgaaatcacttttcttaaaataaaacttccttcttccaaatcttttggattctctattcttattacatgaaaaccgcatttattaacataaaaattatgattccgatgagaaaaaatgggggtttcagtactccatgctcgtgtatttggatacatatcttcaatttcactccaaattctcgttccgatacccttgtcttcataatcagggtcaataaacaaactgcctaagaagttttcattactatcgttaatccaaagaattgttccaccaataagaacgtcatttaagtatatacaataagaagttgcttttttatctaatccccatttactcaagaatgtgccatcatcatatcctggaggccctccagtttctttccccaagtgaatttgtgaatcataatcaaaagcccttttcattattttaacaaggctcgtaatatctttttcagtcattttaccaaattttatattcataccttttccccctctaatcttttcgctatttcttctatgtgagtgttgtcagccacatggcaacctcctaaaattttagaaataagataatagtattctagctttgcctgcttagagaaattgaaacttgtgttatcttaataagtctaattcaaatccatattcatgaaatgtaaggtttgcatcgattatttcttcatagattccatctacttgcataaatccgttttttaggtataaatttatggctggtttatttatattgacaacaaaaagtcttaaatatttaacgttcatatgcttagttagtgtaatggcatgcttaagcattatactgccaattccttgtcttgaataatcaacattaactccaaaacgttcaatatataatgctttagagtttggattcccccattttacacaactttctccagcatttgattcacataatgcaaaggagccaactatattattatctttctcaattagcaaataaaggcgattattttcaatatccttgctgaaaaactcacacggatatatttcgtcccaaattggtatgttgtttctgtccatatcatcaattatgtttccatacacagctttgagttttggtaaatcatttaaattagccaatcttaaattcatatcaattcacctccaaatgactatttataatgttcaatattaaatgtttacaaaatcagtattcaacggtacattttccattctgtcagcctatatatagaacaaatttcaaatttcaactcctgttttccagattaccaaactgaaatttatatatttggactatttttaaacttaacacaatataaatttagctaatcgaaaaacttccctttataaaaattctcattttcaagtttcttagccgtcattctaaatataacgcagccatctgggcatacaacatctttgctatacttgctatctccaccaatattctctaaatctccaccacttctgacagcctccatgattgggaacataatcatcattacttttgaacaaataccttgtccatccttatttataggacaaccataggtgcaagtatacttatcaccaacttcctcgccatttcggcaatacctttctgtgtggtcacttcgaagaaatcctgtcacctcaatttcccattcgtactcttcatcataccattttttcataattaccctccaaatataacttatatgtttattattatttaacacttatttgccatttttgaatcagaagatattagacgccctcttcatttacgtgcataattaaacttactaaaacaaccaatacaatttatcttttgatattttaaatccaagtttcttttgtaaagctattgattttttattttctacttcaacttgtgaaaatggtactaaaccattctcaagtgttttgtttaccatataactttcaagtattgttccatatcctaaacgtctgtattcaggaaatatctctaatagtcctatgctcccttctaaatgatttcctataaatcctatgagcacgttgttcttatatcctccaaatatatttccgccttttaacagtttttcaatctcattattagataatttattataacgtcttaagataatttctatttgattctgtcttaattgtcttagttctacctctgattttatatcgatctttgctttatcaatatatactgcttgaaaacattcaagttcttcgtttaacccaaacttacttaatatataactggttataaacttttgatgtgcaacaattaaattgcacttggatatgccatttattagttcttgtcctttttcaaaattgtctacagatatcatatatgcattacttttttgctcttttatcagtaccccatctatttcagcatacaaaatttctgccgtatctctacgtattgcctcaatcattcccatatgtaacaaaggattttttattaaatatttaattgccgcagatttcatacttttctaccctttaaccttttcgctatttcttctatatgagtattatcagttccacaacaacctcctaaaattttaggaacaaaatatttatataactccatcatatcatcagcaagactaataccatctgaaaatttcaaatcagaagaattatctaattcttctggggataatggcgaagtgtttgcttgtattccatgaaatctttctttaactaattttgttttattgaaagaataagataaagatttttttaatattgcgggatgaacacaatttaccatatagcaaatcggctttttaattgtagcattatctatatgtaaaattgcatcattaatagtagttccatctattagtcgcccatcatccctaatcataaaactaattatatatggcaattccgtactttccatagcttttgccattccaatagcttcaggcaacgctggcataatacctgcaaatagaaaatctacacccgattctttaaataaatttgcctgccatgaatggaattcctttgcgtcatctattgataagacatcacaagctttgtatgcatctcctttgcatcccattaaaccacctacaaacatatctatctttgcattactttttattccttgcagaaatctcacattatcttctattattttttcagtaaattcagattctaagacacgctctttatttgctcttcttgtaggggttgttacaatgaatgggaatttatatttttcagcagtttttagatattctttataaatactacacatggcttgtcttgaatcagaatcataaactaaaccagccatagcaaccttatcatcaaatataatattaaattctctttttaatctttctcctaaagctccctccattaaaatagatgaagatttatcaaagcaagtttgaaagtccatatatactcctctttacatttcatcttttaaaatttttcatatcattgactagatatttaacttacagccactcattaaacttcatatttatcaatagaatattttatattaagtctacgactgattatatttattatataaacactacttataagcttattttgatgctaatgaaaaaataataccatataaaacacatcctaaaggaaataatataaatatgcttcctaaaattattgaacctatattaaatgaaaaatttaatgcactgtcttttgttttcatctgtttcaagtatattttattcatcgctatgcctgtgccaccgataattatcaaacctgttcctataaaacagataagagcaatgataattccaattatagctgcaaagaatggaaagaaaattataaatcccattatatcacctctcctataatttatttaaaatgaatactcctgcaatcaaataacacaatgttatcaaaatgccgacccacatgtgtatagcagaaagtaaccaataacttacttttacttttttatctgatgcatcaaagcgtttactcatcttcatccctttatatcctctaattattgcaataacagcaaaaaataaagcggctataaatgctaaaatgatgattacatttcctaattttatcattcttttccccctttaatctaaatactatatttattaaatctttttattaaaaatgctttttaaatcatttaaattagaaatagtctttatattattaacaataattgtttctcccctccgatttaaccaaataccattcataccaattctttcgcaaggaataatatctgtatacaaattatcaccaatgtagcaacattcttgtggttgcctattagctctattacaagcaatattaaatagttctatattgggttttgaaattccaacttctcctgccgtcaaaatattggaaaaatattgtttgatatttattttttctaactttaataattgttgattaaggtctccattactaataattccaagctcatattttcttgataaatactttaggcaaggaactacatcgttatatggcttccaatttttttcgtagttaattaagtatttcttaaatttaatattagcatcctcatctctaagtttaatatttgaatatctaaatagagccttcatcctttcaatacgttgttgttcaaatgtcatctctttttttaggtaactactgaaatatttatctgatatctgacaccaaagtttgtagaacatttctttttcaagcttaaagtaatgcttatactcctcataaaatgattctactccaagtaattcagaacttttatgatctaataatgtatcatctatatcaaagaaaatcatctcttacctccatttaccaaaactattatattacatcgtctcatgttccatccaattcttattatgattactacattctatgcaacttagtgaaatgcatatccattcaaaaccatcaacccaatcctcttctgaaaaagaatcatcgttactgacacattcgtcgacaaaatcctgttttccttgcgaataaatttccattgatattacgaaagcatcttctttacatttttcacaaattactttctcaaacaattgggttctatctaaagaatcatacttacatacaaaaccattccatactatttatatcttggatattctggcagtaagtcaattagctttactgaccttccttgattatcaagtaatatttcaatgttatctgaatcttttccaagatgcatcataaattctctgcattcgccacaagaaggtataactttaccatccttataaacagaaacgactttatctacttcgttttctccatgtgtgagcattgttgataaagcatttctctctgcgcacattcctaataactatttgtatcaatacaaattcctgtataaatatttcctttttttgttagcacagctgaagcaacgcttccaacccacatagtacttgaaatttcatgtggatttattacattcatagcttctttataaagctttttcgatatttttccatattgttctccttaatctttaatttagtatttagatttatctatcaatctttttgaattctctttccaccgaatgcatgaattgtcctagttcctgcaatacatttgccatgatgtggtgttcccttaggcactaaaagctcatcgccaggatttaaaacatgttctataccattaaatatttctatatattgtcctgaaacgcaaaccgtatattcattaaattcatgtgtttgttcctttgattctctatcagaatagtatgtccagaatgccatttgactaccgtcttttccctcgaaataatacccttcaatatctcttgtattctgttgttctgatgggactttattcttttctcttttcataaactcaggaaaatattccattctgcaatcacccctataaattttaatttctcatttaccttataacgtcttgatagattatatccactatttcatttaagcttaattctttatgtaagcatacctctggaataatatctattaaatctttttcgttccaccattctctcatttctttctctccaaattcatgtgaattggacttttgcttatgacgatttaaagtttcctcaaattgtatatcaaaataatatgcaaagatctgattatcaaattcatctgataaatctttaaataattttttataccactttgaatttaaaattccttccaaaattatcatattacaatgattcttgccgtatagtgaaagttcaaatattaattcacctgcttttggattaggtccatcttttgcaaataggatgtcccttctaacaacatcttgcgaaattagcattgtgttctgtccgaattttttctgcaaagcttttcctgtagtagtcttaccacttccagaattgcctcttagaattattaacttcgccactctttaccactccattccccagtgtctttccgttttgagttaattaaaccactgtccatatctaactaattataacatattctgtaagaatattacgaattaaatattaaggagaattagttctaatttatttttttataaaaataacaacactaaatatctaaaaaattagtgttgtccattatatttccaaataatcggtcattaactatcaaaagttaattctactcgcctttatatcactttacttacaatttttataatagtttttccataacaatgaaatatcctgaggattagtgcatattaatctgtaaatctcaacagataaccatctggatcttgtataagaaattctttctgagcgcgctcttctccatcacttaaatacgttgtttcttttaattctctataaattttgattttattgcttttaacgacctcgtataattgttcaacatcactacaagctatagagatatttattcctcttcctagtggatactctaaagaatctacattccatccatctgaatgaatttcctcaaacatgaactgactttcgccataagataaaaatatgaatttttcgttgattctttcatattccaatttaaaccctaaaacagatatataaaattgttttgtatactcaatattagttactgatagttctggtattaatgcattaaatttcataattattctcctaagtacattatattgatagcatttttattgagctttacaattgtgtttatttatttgaaagtagtgattattcataaagtcaatcctcgctatccataaattatagcatattttgtaaataagtattgtttaaataccaacatatcacttctcttactagctatattataaacttagaccaagtatttatatgtattagttcactaataactcctaatttatataaacacctatatatgttctcaaataaattaaaaccatgaagtatcattataagatacctcatggtttcataatctttaaaaaatagtgttgttaaactatcatatctaacattgtcttttcattaataccatcttcagttgaaattgaatatgacatatcatcctttttccatgttgctaagttatactcttcatttttgtttccttgaagcgttacgtctatcccatttacttttactgtagtctttacatggtaggtattataatctccacttatattatcagtgcttttgcctgctctgaaaatcatattgctattaccattgttataatctacttgtatcagttcatttgatataacacttacactttctactttaaatccagtaggcaatgtttttaattgactcactttcaaattcaatgctttttccgcttcatctaatgtcttatattcttgactataacttacgtctttgtccattgcaactggtgtactagagacactatcatctgtattatccccagatattttattttcttttacatcttctggagatgctttttgatctgtgcttgttggatttttactttctttattattaatatcatctttatgatttgtttttgaagatgtatttgaattttctatagatttattatcattatcacctgatgtctgcctcttcttttcctctgatcctgagttagattgtaagttgtcttttccttcctgtgcagcttttgaggcattattgatatttttgttcacatgactactgccattattatagttattatcacttttgttattatttgtattattttgatctacagctatatcttctttatgatcattgtcagatgcttctttactatcattattataaactaattcactgtcatcactagattttaaatcattattcttatcctcatgattttcttccacttcattttgttctaaatcattagacggatgtttgaaaagcataggataacttttagctacacttagacatataagtattgcaccacatgctgccgccatttgcatatttcttttagcattatatttctttacttttggcatagtagtttttacttttatttctttttcttcattgttatccttcttattttcagccaaaacattttggagtattctttttttcatatcgtcattcataactattttatttagttcttctttatatttattactcaaaatcatactcccccttcagctctttctttagcatatttcttcctctgctaagtaatgatcttactgtagcttctttcttatttactatatttgatatttcgactgtagtatagccttcataataatataaatgaacaatctccctatatttcagtgggagtttcataacctgatttaaaacattattatctttgtattcatcgtaataaggcatgtcagttaactccacatgctttttaaaccatactgatttcaatttattcttgcagatatttctggtaacacaaataagccaatgctttttgtgatcgtcgctttcaaatatctctatatttttaaacaattgtacaaaaacatcttgaacagcatcttctgcatcgtatatatttttcatatatgaatatgcaagcctcaacagcatatctccataatggtctaaatcttgtgaaataatttcatccgtacgcaatgaaacatctttcattaaaaaactcatccttccatccagtagcacaccaatgtattatagatattcaactttaaaactaaatttatgtggtaacttaccgaaatcataaatattttgtatttcaaactgcttatctatagtcccaaaattaactcttccttattattcatgtctctacttatgttacttgttatttaaatctctttctaatacaagttttaattaacttaatttattaaattgtaattgtagtaataatatgtaataaaaattatttgctagaatatataatcaaaaactagtttaatatgtatatatttatttctaaaaaaacctgttatgtacctccagatagaaaccagatacatatttgctatggcattacttgaaattaatcttataaatatccttagatagaggttgtcctagatattgcctctctaaaacttgtttatgaaatatgcataaatagatacaaccttcttcttagaacattccagtaaaaatttcatcaatccatatgaagaaatatgtattgaatttctatcatttgaggcacaaattaggtttttgtgtcgattttctgtataactaaaaagtactttttataatattaataatatcctcttgtttcataccatcatttagtgagatagaatatgacatattatttacgctccaaacagcaaccttaataagattgtcatctccttttaattttacattgattccatttatatttacagtattattaattttatagtcattataatcaccacttatatcataagttccttgtcccattctaaatatgatgtcattttgtttgtttacatagcatatttgaaataaatctcttgatatggtatttatatattttatattgtatttacctaataattcttttggtactgtaatcttaaattttaatgctttttgagcttcgtctatagtatcaaacctttcaataggacttattatatcatctgcatcttcaggtttatttaccacagtggacgctggtttaccgtcccattttccgttttcatctaatttatatccatctggggttactgtacctgcagccatttctccattatttaataaatagtaccaatttccattagtttgaacccatcctctttgcattatgccatcattattcataaaataccacttattatttattaacttccatcctgttgtaagatctccattaactgaataaatccattgtccatctttatttcttacaaaaaagctacctactgtttttttattattgaatatctcattatacaaattaattggtacatatacaacattatcaacctttatagtttctgcacctaatttatgcattatttctaataccatagtatcagggtcattacttgaataaaaatattcatctgttcctacataaaggtttattttagttttgccattatctaatcttacagttttattgtcattatctgcttcaaccttaaacccgagactttctgctgtaatgtttagtggaaccataatcttacctttatatattgaaacaccatttgctccaagctcaatattttttccgcatattgataccttgttaatatcaacatccttaggtgcatagtttgatattggaacagtatcagaaataatatttgctggattagatttgtgccttgatatatcatctgctgcaagtgcttgagctgacatccccacaattgttactgctgttaataaacctatcattaattttttcataatcttatcttctccttctaagctcgcacaatctaatgctgtatttatttttatgtgcttgcatcttaaattttcattttaggcacttgaaagaaaataacaagtccaaaattgccatggtatatcattcgccaagaaagcggatatcacttatagtggaccggacatattagtgctatctgcctaaaaagcatgattgaatatagattggcagatggactagttattttttgattgcctttatattagtaatacaatccaacttagagaagtgttgcaaaaaaattaaaatttttataaaaaatcttaagatcataaaaaaacatgacttatatttaaaatataatacaagaaattcaataagtttatccttattaatatatcaacatcctacataacctcttttcatttttataactacctttgattaaattcatattttcctattgtactatatttaccttttctccatcacttaataaattttggccttcagtaatgacatctatgccctcttgcactttgcctgttacttctgtaaatttctcatttgaaattccagtttcaactgatatctttttaaccaggccattttcaactgtataaagataatttacaccattctccattttgattgtttcatttgtaaccatcaagatgttgtccttcttttcagctggtaatgatattttagcaaacatacccgcctgtatattgttattagtattatcaattttaaccttcacaatgtagaaattatttttagaacttgtatttgggctgatattatctattactccaactatttttgaatctggtaatgcatttatagtaactggtacagatagacctactttaattttctcaagcattttatcaggaacatttatttctgcacttagactattataatctataagagtaactgatcctgattgcgcacttgcaagttgtcctacttctacagctttttctgacacaactccagctattggtgcagtaacggtagcgttacttatttgattttgtacagcactcactcctgcttgtgcttgttcaagctgtgcttcagcagcttttgtagcttgaggccctgacttactctttaatagctctaagctatcttgtgcattttttaagtctatagctattgcatcatattgagcttttgcgtcatccaaatcctttttagctactgcttgtgctgaatacaaagtttgtgttctgtcataactatcttttacactattatattggatttgtaactttcctaccaactgttccgcttgcaataattgctgtgtaaaccctgagtcgcttgttctttctaagttagaactagctacactcactccagcctctgcctgctcaagttgtgctgcataatctgttgtatccaatgtaaataatgtttgacctacactaactttatctcccacctttacatccacagtcgcaactcttcctcccgctttcggcaaaaccactacctcttttgctggctttaggttacttgcatattctacacttgtagaaatagttccagttgttattttttccgtttttacatttttaacctcttgtactacttctacgggtttctttttagcaaagatagaaataactatgattacaataattgctaaaactactcctcctattaaaagttttttatttttctttaaccctttaaacttcataggtgctacctccttctatggtatgaattttcttctttttaaaagatactaccttttttaaatcatccattaatgtataaataattggtaatacaattggtgaaagtattgttgatgcaaccattcctccaatgattactatagccatactctttttcatttcagttccttcacccatggataaggcaactggtaacatagaaacaatcatggtagcacttgtcatgattatcggtcttaatctagtagcaccagattctataagagcatctcttaaattcattcctctcttcataagggtattagtataatctataagtaatgtaccatttttagatgctaatccttctaacataattaatccaattatggacattaaatttaaagtctgtccagttagagccagtaaaccaaaagctcctataatagcacaaggtagagccatcattcttataaatggagttaagaaggactcataaagcactactaaaatcatataaacaagagctaaggatgcacataaagcaagtccaagagaagaaaaactttccgccatctgtttttgatttcctccaaagcttatactatatccatcaggaactgaaagagcctttagtttagcattaatatcatcggtaacttctccaagaactcttccttgaagattggcttcaacagttgccatatcctgcttatcctccctagatatagtaggagcactatctattttttgaatggatgcaacttggctaagtggaatttgttgtcccgatgaatttgtgattttcaaggacttcagatcttctgcactctttatttgtccattttcgaacttaagggttatatcattttcctcattttttgatctatacactcccacattagttcccgcaagcgccattctaacaacacttcctatgtttgtagtagaaatattgtactgagtagctgcaaggctgtctatatttaccctaagctcactgcttcttgaacttgtagagttacttatatcagtgattcctggcactgcacttagtaatttttcaacctcatttgatagatctcttatagtatctgtatcattaccttttattttaattgatacaggcttactacttccgccagatgaagatgactctgctacatttaaatctactccagacatatttttaccaaatctgcgaatctcacttgcaagttcactttggctttttttacgttcacccttaggaactaggttaatgaaaatctgagcaatggatttatctgctgttgcttctccatcatgcccaattaatgaaaaataattttttacttcttttgtatcctgtaaatatttctctacctcagagaccttttcatccgtttgttttaaagttgatcccggtgcaagcttcatgctaatttgaagagaactctgatccgccataggtataaactctgactttattgcccccatcggaataagcatgatactaagcacaacgcctgcaacaactatagctaaaacttttttcctgttatctaaagaccatattaaagcctttttataggtttctactagtttatcaaaagagccttctgttttagcatttattttgttaaatttagaacttattattttgataaatttaaaatttattttgcttaaaaatttagatttttctttttttactaaaacacctttaaggttctcattttttaatagccttgaagaaagcattggtgtaattgtaaaagatacaattagagaaaacattgtagctgcaactattgtaagtccaaattccctaaacatctgcccaactaaacctgacacaagtgaaacaggggcaaatacaacaacatcgcataaagttatagctattgcagccattcctacttccttacgtccttcaatggctgcagctataggatttttccccatatccatatgtcgctgtatattttctataacaactatagaatcatccaccagggtacctacaacaagagataatcccatcaaagacagcatgtttaaggtaaagtgcatctgatacatcataaaaaacgtggcaaccagcgatgttggaattgcaattaaaactactagtgaagaacggaaactacggaagaataaataaagtacaaatgcagtagttatgataccttctgcaagattatgttttatttgagtaagtgaagaattaataaaagtagtagtatccattaaaatatttacttccgttccttttggaagtgtcttttttacatcttctaattccttttttacagaatcagcaacttctactacgtttgaatcactttgctttccaagcatcatcgctatggtcttgttaccaccaaaccttgttaatacattggcatctgggacttctaagtcaatttttgcaatatcaccaaggcgaattgtcactccattacctgctggtattaatagatttctaactgcatcaacgctactaaattgcccaataattctaacagattgatctaagccttcttgtttaatctctccagctggtacattaacgttggacgcctgcagtgtgcccattaaagtatcaatgttcactccataatactccatagttgctttatcaatttttatcatcaattgctttttatcagcacccagcaatgaaatattccccaccccaggtactttttctaatctttgctttaagatatcagattgattataaagttcctcataactggcatccccatttattgaaactatcatcataggtatggaactcatatccattttatataaaataggcttatctgcagctttaggaagttttgcagaggtaagttcaactgccttttggacatctaaatatgcggtgtttatattcgcactcattttaaaagttattgtaacagtaccatagccttctccagaagttgaatttaaaacatcaacaccacttattcccgaaactgcatcttcaattggttttacaatatcttttttaatatcttctgcactagcaccattataagttgtcattactgatataacaggaatgttcatagatggcattaaatctgctcccatgcttttataacccatgatgccaagtccaataaataagattactgccatccacatggctgctggtctttttactgatatttcagttatactcatttctctccccctaactctatgttcataaagtgaaacttttcaggtgaagtttttttggtgccccttgagggtaaactccatctgaatttagttaaacttatccaggagcatgcagccgttatctcacacttaaacagataagtgaaagtccaaatttacaatttggtcacttgaacttagttaactcattcatgagttaacctcatcaaaaattgatttagtgtgaatcacttcctaatctgacgcaaggaagaggatcttcatatattgtgagggtgttacggatgctagctatcagataaatttttactcattatctcgctcattctcggtatgtcattatttaggaaaccgagtaatattgcccatacgtttaacacaaaaacagttatgttctaaataatgccgattcttacatgtatgctgcacgcacccaaattagaatagctttcttcttaaatataaacatttaatgttgtatttcatattccaatatttttaataattttgatacttaatataaattctgtacattttactgctaaaaaagagagcttactacacataaactctcataaatttattatatcctctgtatctctatttttaacctaatatttcttttcaaagaagatctgctgcccaaagtgcatcatatgatgtctagataagttcaactaagattcagcttgatattccccctcacctgaatcaagtttcactcgataaagattaatagcataaacatactaatcgttttctgatacaaccgttgttccagaaatataatcatgaatagccctatgtgatagcgtacttaaaaccaagattccggacacaatcgttaaaattctgcctgctattccaagatagtattcaaagtaaaaaccggtcacaagagtaagtagctgcattaaataacttgttataacaattgcagctccctctatcaccatgatccctacaatttgtcttattaaaaggttttttaaatctacttctgaataatcaatttttacgattttaatcttaaccaaatgctttccaattgtctgaccatggtattttttataaggtatgtatacataataaattagggctgcaataaaacataggccaccagctaaatatgcccatccgtttgaatatccaagacttgcaaacacatagagattgctaaacatatcccctttctttgttaccgcactataaattaaaactgcagggaatcctgtgataattcctcccaaacaccaatctatgatgtaagccagtagccgttttgatatgctcacattagacggcttcctatccacccatgatgttacttttctccatgatttatgcataaaacattcctcctattttgaatacaaataatccatggcttttttaaagcgctttaacccatcctcaacctttgagcgactgcatcctaaattcattctcaaatatttagcaccattctttccataagtttcgcccttcataatagcaactccgcccacatttactagcgcatcctgaatctgttcagaggtgaatgaaactccccttccatctatccatgccaaataagtggcatctggttttttaaatttaaagtctggcagctcatttttaataaagtcctccaccagctgcatattactacctatataatcatttagctcatcgatataatcatcgcattgcatatatcctaccattgtcgcatacattccaaatatacttgcagaattcaaaaaatccctcttcctagtatgatataaaaaatcatttctcaccgtctcatttggtatcatcacatatgaaccaatcaagccaggagtattaaatattttactggaagaagatgctgtatataactcatcataatcatagatatgggataaaagcggtatttgtttcttttgtccaatctgtatatccatatgtatctcatccgaaattatctttgtattatattttttacacaataatatcatgcgcttcatatcatcttttgaccatatcatacctgttggattatgtggagagcataaaagcaatattctgcagtcctgtacctgtttctcaaacaaatcaaaatcaatttcaaatacaccatctttatgaattaaatcatttgataccaatatgcgatcattatcctctataactgtaaaaaatgaatcatacataggattaaatgtcaaaatcttatcttttggacaacttaacagcctgattagtaatgatactgaatacataacgcttgtactatataaaatccaatcttcttcaatgcatgtattaaatcttctcttataatgctctgttatagaagatttgaaatcatgatgattccacctggtatatccatatatctgatggctggcaacttgaagaattttttcagtaattggttttggaataataaaatcggtatctgaaattgaaaatggtattaaatctttcttatgaaagcgatcttcaatataatcccattgtgtagaataagttcccaagcgattatgaacctcatcaaaattatatttcatttatttcacctccaaaattatataatcctttgtagttttatttagtggaacacctctgccatcaatgataaccacatcatcttcaatacgaacgcccccgatattcggtacatagattccaggctcacaggacatcatcatatgttcctttaaaatggtcttacttgtagaattcaaaattggcaattcacagccatcaccgattccaaggccgtgacccaggccatgattgaaatactgcccatatccatttttctcaataatatccctagcagccttatccacgacacttgcaataactccagcattaatagcgtttaatcctaccagctgtgcttttaaaacgatatcgtaaatttctttaaccttaggttcaggctctccgataaagcacatgcgcgtcatatctgactgataatttttatattggatcccaaaatcaatcataattggctcatgagccttgactctgcgaccagttggcctgccatgtggaaaagcggtcctttccccagttgttacaattgtatcaaaagacatttgctgcgctccttgcacaattgaataatattggaccaaagcgcttatttcatactctgtcattcctacatgtatattgccaagcacttttttataaatatcgtctgtgatatcaactgcctcttgcatgatatctatttcttcctgctgtttaacaatacgtaaatcagctatttcttcatctaacaaaataatctgaacgccaatcttttcaacatctctgtattctttaactaacatctgagaagcttcaacccctaaatttcggcaatgttcttttttcaatatatcttgaactgccgctagataattacatcccatttcatgaggtgagtgaagaataatttcaaggtcatgttctttttctttagcctcagtcagatatctcccatctaatataaggaaacctttattttgagtgattaagacattgcatccgctgcctgtcatagttgataaccattttttcatggttttacttttaataagaagagcatcaatattattatgatgcataaactcatgtattttttctattcttttagccatattatcaccatccttaaaaatgaggagctgtcacattaagaaatttaactacgatatgttgtcttaagatttaaaaatccaatacaatatattataatttgttctttgtgctacagctccttctttttagaagtccaaatcgagatcctttaagatttcttcatcttctttagacatgttattcttatcattttccttttgttgataacgtttttcgtatatcttaaaaaatggataccatacaacaagtgataggactaattgaattccatttgcaacaatggacattggatccatattagtaagatatccttctaagaaaacacccacataaggaggtgtaaagaatgaacagcttaacattccaaatttcatcatccaaccagggatagttcctataattccaccgcaaataacgtatggaataaaaaatataggatttaatacaattggagcaccaaatagtattggttcgtttattccaaataacgcaggaattaatgcaacacgtcctatctgctttaaggcctttgatttagataataagcaccagaatactagaccaaatgttatacctgttcctgtaaagttaccaaatgcagactctggacctggggcgaagaaatgagtcatggctaatccagctttatagttagctatattttctgctaggaactgagtagaaattggagttgttattggactcaatacagaaggatgaattccaaagaaaaataataaacattgcaacatctttaagaatgtataagacaacggattgtccatagaccctactaatggtgcaaatatgcttgtaaaaatcaatggcggcataatattaaacacattaacacacacaatacgtataattaagaagaaaccaataataataattgatattggaatcatttcaaaagatcttgaaacaaaatctggtactgaatcaggcattttaattgtgaatttcttctttttacaccagcgatataattccactgcaataattgctgcaaacattgctgcaaacagaccttttggtcctaaatatttagttataattccaccatcttttgtataatcaacagtcatcataaggaaagaaataaccgccatgctgatacaccctggtacatccagcttgtaggaattggcaagatgataggccataaaagctgtagcgtataaggccatcagtgccatacctacgttgtaaggaatataaataatatcaagattagctaatatccattgagatattggattattctcaccaatcatattagggatggcttctggaatcaaacaaaaactaccaataatcaacaaaggcattaaagctaccatggcttttttaatggcacttaaatgaatttctttatccatcttgttagcaagtggcgctaagtacttgctcataaaagcttcaaacttgttaaacattattcaacctccttaatttatttttttcatatcagcttttttacgttctataaggactttctttaatactgtcgctccatccatcttgccataagtctccttatcaacaacaacgtaaggaatctcatatggatcaataattgatttaatataatcaagcttatgtgcaatttgcggtccaacaacaacagcatcacacccttctacttcactttccagaacatctacaggaattgcaatgaaattaaaatcttcttctttaagtttttcactttttttaatggtatttttcatactatccataagcatagttgttgaaaatcctcctgcacagcataatacaattttcattttatttttcctccctttcttcaaatacatttattaacgcctcaattagatctctagctaattgagcagtcatataatggtcttgtgcatgtaccattaataacccaacttcaggtttatcttcgctatttgacaattcagcagttataatctttgtttgaatttgatgagcagccaaatctgcctctctggcttcatttaataatttacgagcctcatcatactctttcgtctttaccttttttaatgcttcaaaagatttcaccttactttcaccagcggaagaaatcatctccataataatgctttgttctacttcagtcattttcatatcctcctaaaaaatctataaatttttcgtaatctttacgttttaaacgataacatagctcatatacaagtttaattaaattttccaaatcatcactatggacaaaagaatatgcaccatggcaatatcgtagtggtattcctaagaccaatgatagttttcctcctcgatctaaatgtgcatttccagcatcagttcctcccccgctaaacatatcgcattgatatggaattcctttttcatccgccatattcatgatatatcttagaagctttatattaggagacattgtcttatcataatgcacaatcattggtcccttaccaataagacgatgatttgtataattttttgtgagttcaggattatttgctacatctaaagcaaaaactatgtctggattgactatatgagctgaggttttccctcccctagttccaacttcctcgctgcttgtcccaacgaaataaatatcattttccaaatcatctttcatcttcttcatggtctcggcaataacatagcagcccgccctgtcatccattgcttttcctatataaaccttttcatttgataattgtcttgcttcacttgcgaagcaaaccatattgcctatttctactcccaatgatttaacctcatcaaaagtgtcacatccaatgtcaacatacatatcttttatatttccttcactatctttcgtaacatttaacagtccctctatttttttaccagtaaaggttgtcaatctaactaactgcatttctttgcttttatcctgcaccccgccgacagctataagataaataaacccgatatcagaaatactacgaaccataaagcccacttcatccatatgggcgcagaacataattttcagtggattctcacctttcccttttttatgaaatataatgcttccaatattatcacaaaaaacctcatcactatattttgtaagttccttgtatagaatctctctgacttcattttcatttgaagctatactgtccgcatcacttagtgctttcaataaaatatcattcataattaacacctcccatctctttcatcactgccataagctcttcaaaagatttaacacgaataactctttctaagtattttggctcccgcataagctgatataactttttagtaatgtctttatagacctctacctgttccttttttaaacaaatcataaaaatgatccttacttctttttccagccatataaagggcttttttaatatactgactgatattacatttcttaaggcatctgtttcaataggatgaggtatgcatacgccatttaaataaatggtacttatgaatgcctccctttccataactaagtctgcatatccttccttgccatatcctttcttttcaagatcttctgccatctttctaatgagatgttcatagttatcttcttctgttatattgaaaaattcctttgagaaatatgaatagtatattggattttcattaatcaatgtatatggatcataatcatcgcactcgagaatctgcctaattctatatagatctttgtcatccaaaagctcttttatataaatgataggtatgtgggcatcataagatattggtataactgtaaaaataatatcgggtttatagctgatcatctcatcctgctgcaaaaaagagaaggttttgacttctgactttgggaatacggattcaagctgcattttaatcatatatgcgcttccaccgccagaagagcatattacgcagattttattgtaagattgaagctttagctgtttctcctttaccatatgtgctgcaaaatgcatagctacaaaacctatttcatcaaaggtaaattctacattatacttttcatggagaatatcacaaaattgtattgctatattaaatatcatgggatatgtgatacttagctcatttgccagagcatttttatatgaaattttattgtgaagcctgtctactaataaggatatatgcgaaagtaaaagccgtttcaagtcctgatcttcaaaaaaatgagtatcataagtttcatctgtttttttcaaaaaaacttctatatcatcagtcaaattgtcagtgaaagaaacataggtatctttcctatggatatttttctgcataacttctatcaattcctcaacgctatccttatcaaagcataccttatatttcttttccattgtatgaattaatgattcaacaattttttcaataggattagattcatgaaattcataatcttggacaggctgcttatttccttttagtgaaatatataccatggactttagataaactatcatatttaatagctcattataattaatatttaatttttctttgttcatctgtcttatcaattgagactcaacatgtgaaaagtcaattacaacaccgtcaactgccattctaacaaatacgtttttagtttgatattcctggcataagtattttttaagatttctatctgaagaaactattcttattccatgatgactctttttttccaaagccagatgataacctttagctagttcctctacctctttaatgtcatgcttgatcaatgttttagaaacttgaaaagtgtctgcaactttatccattgaaatgtattcattttggactgataaaaatgccagtatttgagatggtctttcttttatcttaaaaacaatgttttcatctaaagttttaagaaatttctcgaataattcatcgtccttaacctctaataaataccccactccccttttggtatgtatttcaaatcctttgctggtcgaaattctcatgagatatgaaatgtcactttgaattgttcttttagatactttgtatttgtgaatgaaatattcaattgaacagtaatcttcattgtctatgaaatcactcattatctgactaaatctcatctgaactccactctcctatttcttatattattattatataaaaataatctgctagataaaaggagaccttttgcatataaaaatgcaataattttcctaatatgtagctaaaccacaatacaagacttctctaaatattaatcattattcaaaaatattgtcctctccactattgtatctctaagttacattttatgaaaatcaaaagtagtttcataaaaatcatactttgaataaatatcctctctttttattactttattcaataaaatccttaatttcatctttgcttaaattatctaatgcaataatccctcaattgtcatttccccaaaatctgtctctactaaatctaataatataaatccttctggttttttatttgtagctattatactcgtttttatatgcacaggccttctcaacttatcctttgcagttaaaaaattatacatataattaaacaagtttattcccacaaaacattgtgctcttattaaaatacttttctaaatgttcaattaagtggtatattataatggaatttaattaataaacataagaggtaatctacatgaaaacaatagtaccccattattataaagattttaaatgcatcgcttcaaaatgtactgatacttgttgtgctgggtgggaaattataattgatgatgaaacatatgagaattataacaaggtaagtggtgaatttggtgaaagattaagatcaaatttaacattatatgaagatggagagcctggttttgtattacaaaataataactgcccgtttttaaataaaaataacctctgtgatatctatactgaacttggagaaaaaagcttatgttatacatgcaagacatacccaaggttaatagaggaatatagtaatttacgtgagatgggggtatctttgtcctgtcctgaggctgcaagattaattcttcaagatcctaagccaattacttttgaagtttcagacgattatgaagaggaaaaaccatatgatgatataaattttgatatttccatgcagctaatatcagctaggaaaatggccttagatattctacaagaccgatctatagatttaaatcataggattgcattagtaattaattttgctcatgatattcaagaagaaataaataaaaatgagctatcaaaaattaaaaatacagtagatagatattctagcgaatcttataagaaagagcttcttaataagtttgataagtataaagcaaaacaatcttataagtataaaaatatgcttaaatgtatgaatgtgtataaaaatctcaatcctattaatgataactggccacaaatactagatcatgctattgactgtttttataaaatagacaatgttactttttataaaaaacaatatgatgattttaatgaatattataaaactagaacctatgaatatgaacatttaatggtatattttatattccaatattttatgaaagctatttttgatgaagaattatgctctaaagttacactagctgtcatgagttatctcattattaaagagttaaatgtggtacgctggattgataataattataactttgatataaatgatcaaatagacataatgcatatgtattctaaggaagttgaaaattcagaaaaaaccctttatgatcttgaggaaatgtttaatacgagcagaatatttgatttagaacaattacttattttaataatgaattagaaataatgtgaagtatacggaatacttatctttcagagtaacgtctagtattggtactatactctcatttttgactatcattgattatttgacaaaatttcaaaaccttatacagtattctcgttgaagaatgatatatacagagtctttgcgttgaatacactatgcatttagtatatttttagctttgcatcctgttttcaaaagcaatatacgaaatttatatgcaggtacattagacatttgaatatttacaattaaaggtatataatcaaataaataaaaattaactatttgtatataaatataaggagatgtatttctagtgaataaagatgacgaccctagacattggaaacttggaattttctactataatccaaataatccatctgaatctgttgataagaggaacggtataggaagcactattaattttggaagtaaaattggtaggcgtataatggcatctattttgtctattccagttataataatattattaatatttgttgcttttaggtttttttaataatacaaaattttaaagtttgaatcagaatataattgtaaaatgacacgtttaaaaagtaataaatattggttttaggcgataaaataaaaatgtttaaaatataaaggattaaaaatgttaagagaagttaaatacactccccttagtatttttaatcctttattcaccagctataatgctctatataaattttattctactacctaaaagcccttatttttaagatttgatacaatttccacatatttttctattacatcaaagtctttatagtcatctcttcttaggtctataatatccccatgagagattccacgccttcgtttatttctcaatacacctttaaattctccccatttagcagattgaatagataccagaccatcattttcaccttctgttaactttactaaaatgtacggtattgcaacaacataatcactaaatagatttcttactacagatgtgtaactttgataatacaccccatctacgtcttttacctcttcattgaattttttactatggtacgttgaaaactgtctgcttgcagtataaaagtcaggattcttatcacctagaaatctataacgcttatcaaaaaatcttgcaatggatttataaattccatcaggaattttgcaagcaaggtcaacaaacttacatcctctgtgtggagaggatatcatagttaatgatgcaacgtaatctcccatttctaatttactaatcatataacgtgaatctagtccaccttttgaatgcgcaataatatttaccttttcgcatcccgtttctttcaatatatctaatattttatttttaatatcttttgcattatactcgactgttccccaagcttcttgatttccataataaactgtggctccattacgaattaactctttaggtatcctgccccagtaattaatatattttaagtctctaaaacctacaccatgaactaatacaagaggatattttgttttacatacttctgaatcaacacgcgcttcatgattaattactttataacactcatgatcatactctattgctgcggtatggcaagcatataacatcacaaaaatatttacaattggaataagactccaaaatcctacgataagtctttttacaatatttaatcttcttgaagtacataaaattcttagcattccattgataattaaaataataatgtttaacacaacaataatactatcaattactaatatgtgttctggaattgctaatctttgcattatcgtatttcctattaaatatataataatttggaaaaatgctgtatataatccatataaaacgagacttcttccgcctaacgctattcttaatctaaggtttactatttgctttttattatttggaattatgtttacttttataaaaatatatagaataaaaataattatctctgttaaaataatccacttgcatatatcattatcttgtccaaatttggtatgttgtattaaaaaatatcctaacgcaacaatatgtggagcaaatataaaatatatatacattaaaattttatgtagcaaatttaatcttttagtgatatctaagaatatgatgctaagcgttattagcgttaatgcaaaaatcactataatttcggtcatattttctcctttctttcattataattcttattaaacactttaattttaccatattatgtgataaaaccctatagttctcagaaaagatatatatgcaactaaatttactatcttacatatcatcttttgattaagtaaagattttaaaaaagtaaatggtatggagactttgatgtggtaaaaatttcttcaagtatctaggctttcaaatgatctgataaaatctgttagtttgattcaagttatgcataacgatctataatctattgcttatatatcttaacaacctaacattttatctatcaaatgattacaaaagcattttgtaatgatattactttaataagaagagtcagtttaatatttatgattatcttaaaatagattttaattctgttgatgtttaagataaaatatttaaagctaagattctctaaatttaagaaaatcttagcttaactcaatttattcttactacttcagaacgcctgaaattagacttaataagaattattttctctattaaagtaaaataaagtaatcattttatcttgaatgttcatactatttatggaacaggtatgtatgtagctttatctcttggagctgaaaaccacggttcaactgtatttatccattttttaaagtgttcggtttccatatgtttgttcacatcgtcttctgatttatagccttcgtaaagtaaaaacctagctgaatcatctttggattgaaaaaaatcaaagcatacaataccgttttctttcaatgaattattttgattttctttagtcgctttaataaactcatctatgtgcttttgtttcacataaattgttacactttttactatcataattaatccccctttacatacaaaataaatttttaataaattaattatagcatattaaataagcatttcattattcatcacagatagatgcatcttatatagcattttttaactttataaactgattatttaccagccattttttaatctattttaccataacatctagatctcctaatatgaatattttctttgcgctttcacataataaatttagctactaaaattatgaagaggtgcaaatcgatgaaaaaaattatatttatctgctccatttttcttttcttatcgcttaacctaaatacaattccttcttttgcgtctccagctcaaaaaacattttcacaaggtatttacagaatgaaggatttgaatttgctcccaaatgttgcgtatactgctcagaatgtttcccccactgaagttttcttaattatattcgatggtagcaaagtaatacagcaatctatacgattagaaggtaactcaatacattatgttttaaggccaatgaaagaggattttaattttgttgtattaggtaatggtcaattagtttttactccaacaagcataactccataataatattttaggttttttacgctaatttattgtaaaaatatcttcaaatttattaaatactatgataagtctattttctattaagttaaagtactcatcttgcccccagtagaggggcttttttaattaaatatagattcaccttaagttaaattgttaactttttttgtttttaccttcgtaacttttttactttttaaattaaaaaagggtttatttaaaataatatttaatgaatactttaaaaacttaattatttttaacaagctttctttaaatcaatgtacctttatatgtagaatatcaatttatctacaaaaagaagaagtatctttttctttttagatacttcttcctaacatgaagatatttaattctaagtcttaaacacctatgatatattaacattctaaatcaattaaagcagattattctaatcttatttgcttaggtaaactagaatttactttaatattttttataatataggcacacaaatttcgcaataatggttacttatcatttgcatggtataacgttcaataatcttgcttttatcatcaattttataatttctttttgataactccaaaaatatttcaatccacgccttttgtatagcatctactgtatgatttattttaaacacacaatattttccaccaatagtttttccaatgttaatattcttactttcaaaatcaaattcatcagaaacaactagacatgcatcatagcggcaatctgcaggttctgtaatctcaggattatcttgagttattcctatgattattgacctttcattaaataagctattttctttagcccagcttttcaattgttccattacttgcacattttctaaaccataaggacctactttccttatataagcaattttatattctggtatcatttcaatattaatgtccatactttaccttctttattaataatgtacaccggtgcctgaattcataatataatgctttaaaatgtatttcaacttattttttattttactgaacagaaatatataaataacaatgtgcatttccatcttttgcgtattcactaggaacagtgatttcataatcctccgaaaacactctctttataccccctaatttttgctcactccataccttttcccatgctttttttgcacacacatctatttttccatcttcatctctttcatcatattttttatatagccctgtactcactttcatttccattttctcaaaaaaatcaggtgttacattcattattgtaaggtcataatcccctttttcatcgctagaatagttgctatattttgaaattggagaagcatctttttgaagtatattttcactatcaaaaagaagaggtaatttaccacttgcaatatcaccccatagttcatcaatcatttttattcccttatcagaattatttgttcttattgttatttctttcaatttatatgccataatatttctcctttattgtataaataattattgattttacatcttgtacaaatttaagtttattatttagttaccgtatatcttaatactgtttttaatttatctctttcaacttttctagcgtctgataaatatatttctctatgaactaagcttctaatcttcaaattattttcgttaatatagtctttcatcttactaaaagtttctggttcagtatcataagaacctatgtgtagcatttgaactgataatccatcttctatttcatcaaaataaacttcttctaataatttatctggcttcttcttattaacaatttcaaaggctttctctgttacttcttcgtttacaaaatatggttgttttatcattattgtatatatcagttcatctttattaaatacatcaccactcttgccaccttcagtcatatcccataatccttctaacggataaacagtatattcaaaatatccattaggtataaaaccacttttaggcatcattcttactgcataagcaagagagtataatatagcaattctattagaaaaatccccattattcggattcccttttcccttaatacagaaatattttgctttaggaattttaactaaagtcggtttttcttttggcagatagatctctttttcctcttttttccattcatatttcaaaatcaacacctcaataatcattataaattgttaaatatgacaacatactgtcatattataaataaatcttaatactaacaccctataagttcattaatacttatattaggatttctatatcttcttcttttcttggttttcgttttccattgaattgcttcttttggacagtattgaatacaagctgcacactgctcgcaattatgtttccatattggcttattaatattaaattgtatgttattgacaggacaaattttttcacataatctgcagccattacaattatcatcaacccaaaaatctttatctcttagatgtagttttttcactatcttgtcagtagttttgataaaaatcctatcaattaatgtatcaaatatcaatgggctaacttcacatttgtagttttcgtgctttgtaactatactggctatatgttttaccttatgcttttctttttgaaaaattttgttttgtttttcaatagaaattgattcaaaagcaaaaatattatttaatggcatatggagtaaaaaaccggaattaagcattatattattattttgcaataacttttttagtttatttaacacttcagctggtgttccaccatgagttgctactgcaaaaacatacgtatctttattaatttctagcttttttataattctctctactaccaatggcaaacgattatagatcacaggaaaaactattccaagtgcttttccttcaatctttattttttcttttgctacaagtgaagttattttgcacaaattaaaattgcctaattcacgtgctatatcattggctacttgcaagctgttacctgttcctgagaaatataatattgtgtcctcttctattatcataaaaacctcctatttcatttacataatcaagtaatttactaataactcttattatgtaaattttcatatttaaatacatatactagtttttattgatattttaaggcatgtactatactacacagtcaagatttaattctcagataaacttccatatcaccacagcattctaaattcttatctaatatatttttctttaccttttcaagcagattttttgtttctataagttcattcattttactattaatatcatttatcttatttctaacaagattctcaatacttgtaatatcaccgcataaaacttcattatgcattaatgtacttatttcctttaatgagaaaccaaattttttaataataagtataaatttaatcttttctatatcttcctccgaatataacctatacccgtttttatcacgtttagtttcagagatcaatccaattttttcataatatcttatagtttctttattaatattcaattccttaactaattttccaatattgtactcgtcttttttcataattcatcttcctcaaatttagaattttatattatattaaaaataatattgtttaatactccaatcccaatttacactatacaccaattatagcatgtattacaaaaacattactcgcattgcaaaaaaatgccacaaaactcattatgaataatgtggcatctcgatttatgcgtattggggtttaattaacctaatattataatataggaatatcggtcttaaccaccaaatattcttgtaatttacttcaaaaagttaagtactaaatttctaaattcttttctattactaaacatggctggataatttgcattttaaattgtaaaaaagttttatttaaaacaatgtttctttaaaagaatatttaatggacaccttaaacatttatttatttttaacaaggtttcatttaaataagttttaatgttagaaatattaaagctatccatactaataaaatcggtatggcaaaataccaccttttaggtttttcgctaatccataagttttctgcttcaattttacatttactaagtgtttcttctggtataaattttattgttactgcaataagtattggaagtaaaattatatcatctagcaaacctataactggtataaaatcaggtataagatcaatgggtgataacgcatatataattgtaatcatagcaaaaacttttgcaattactggtgtttccttctttcctaatgctatgtatacagcaagtatatctgattttaattttcttgctctgtcttttagtcccaaatttaaatctcctttaataagattattttcactacaaattacagcaatacaattctttttgactttatattatgtatgctgcaatatccttaaatttatgcaaaattaaaaatcacttagataaatattaagtctattttatttctaattttaaaataaaatagacttaatattgtttattccaacagagactttattcttggatcatctttaacaaaatcaatattctttctttttcttaataccctttttactaaatctttatatctatctttggtccaattattagtcacatcaaatttcatatgactatataattttgatttaatagagtcatccattgtacttgcttcatttaccatatttataattgcttctatagttctttccgaatcttgtctttctattgagtgccataaatctaattcatatttatggtacgctcctaaatcaaatacctcagcaatctttttagcacgctctatgtattcttctgcctctctaaatttcttttctttatataatagtcttattataagagataaaacagcaaatgtttcgtggccattttttcttaacttatcttcataaataccataagcctcatctgttttacccatactttcaaataatactgcttgttgaatttttttatctacatctacttctggaattttatctaatatttcttgagctttttcatactcttttttctccctataaatcgctgataaatctatttttgccatggaagctgtcttttccttattaccagctgctacaatttcaagccaagcaataatttttctttcatatttttctttttcatcaatttgaagtcctaacaaatatattcttagcacttctgatatcattaatattaactcatcacaacctggatattgtttaattaaatcattgcctttctcaaaagcttttttaattccctcttttgatgcagtttcacctacctcttttgtaagtttttttacttctgtatctgttaattcctcattaaatgccaataaagtattaacatctatttttaagacacgtgcaagaggtggcagcaatgttatatctggatatgaaactccattttcccacttatttactgctggagtacttacatttaaataatcagcaacctgctcttgagtaagattttccttttttctataatgcctaataacttcacttatcatcataaaattaactcctctatttattatgttcttattgattaactaaaacaatattaggttcctcattgaaatatttcaatgaggctatatccacataaatttgattctcacgcggaactttatgattaaatgatatcaaagctacataatttgagcaattgaagacttttcatcttttattcataaaaattaaccaatagttaattttttataatatcaccattttaactttcaatatgatatgtcagtcttattttttttaattcatctgaacttcatactgatttcatagagttccacaatgatattcaaacttatgaaattccaacattgccattattcaggaaattcaaacagtggatatgtattgttatcactatggaaccctataatataatttgggtcatagtcttctatttccttttattaaacttctcatataaaattattgaacactcaaaaataattttacttaagtaatggtgttatatttcctgagtagtatacgcgcaaaacatgaagtgctctagtgaaagcagtataaagtaaaagtctttcctcttcacaactataattttcatctcctgcattatatataatcaccacatcaaattctaatcctttagcaagataagcaggtattaccaatatgccactcacatactcatcgtcatcctttattattgatctaacattagtcttatcttttaagaaattatatacctcatttgcttccttggcagtttttgttatgattccaatggatttataatttttctctttatatatttttatatcttcaagaagtttttcttttatagcttcttcatttaaaaaaccaagaagtaaaggctcttctccacttctttccacgcattgagcctcaagccccttatcaaggagccttcttgaaaatttagtaatttccattgttgatctgtaactttttgttaaatttattatgcaggtattatcttcagcaaatatatgagatatattcttatagtctcctacattcataaatgggtttattgattgattcaaatccccaagtatagtcatatttgcatggttaaaaagctgataaaatatttcatattgaagtggtgaatagtcctgggcctcgtcaataataacgtatttgatttctgaggttttaggaagatctcccatagcaccttttagatacagaagggctatctgatcctcataattaagcctgtggacttttattttttctaatgtatatcttcttatttcactaattttcttctcattgaattcaatatttgaatctttcaagaaaaactcaagattctcaaataactttttataaatgcccattaaatcaaattttgtcattctatttatttcatgataaatctctttcagttcattctttaccatagctgtactatgttctataatttcagctttatctaaataagaacctgaatccttaagttcattagcaacttcttctatacgctgttcttcatatggctttaaaagaaataaaatacgctctcttatcttttgaagtcttctttttcgtggaagttttacataatctttgtaaaataattcttctaaatcctgagatgaaattattaaatttcctctaaatttaatattcttaaagtttgtatcttccttttccataaaggttacataacgctttaatatatctataaactccattgatgatttaaactttatattattgattctgatttgatagtcagcttccttctttgatgctaaaatgtattccatcatttcactatagttttccttactaagtccagcacctagggctttgtgcatatattccttaaatgtagtctgacacatattatcttctccaagttcaggtagtacatcagaaatatactcattaaaaatatcatttggcgaaaatatcactatatttttaggagttattttatccctatgcttatataaaagataagcaattctatgaagagcgacagaagtcttaccgctcccagcaggcccttgaacaataagatttctatattcttcattacgaattactttattctgctctctttgtatagttgttacaatgcccttcatcttggtgtcggtacttttactcaagatatcctgtaatacttcatcatctatcttaagattactgtcaaacatatattcaattttaccattattaattttatactgtcttttaagtgtaagttcaccctctactataccctcaggacatttaaactctgcctgtccaatttcataatcataaaacatgcttgaaattggcgctctccagtcatatattagaaaatcaaagttttcattaataagattagatattcctatataacacttttcggccctttcctcccctttttcaacaaaatccattcttgcaaaatatggagataaaagtactctttcgtatttctgctcaagctttattgtgaattcatgagttctcttctgtattttcatagtattaatagactgcataaagtctacaatctgttctaatccattatttacagaaactgatcctacattctcccataactccctttgtacttcaatcgcatcacttttaaatttttctctaaagttacgtttttcatcaagttgtttttgagcttctttaagtacctcctgcagccattcacgttcaagtttccattcaaagtcgttatttttcataatacttcgctccttatgataaaataattttacagaactaattccaaactctattgacattgctttttcgaaagtgtataatataattagagatatataaataatattatcaaaaagcgatatctaacttattgtatcgtttttattttattatgtcaatagtaaagacatttgtcattaggcaaatgtcttttgtttttttctttatgaatttatatttgagtgaattctgcggactgattacttcttgaaggcataaccttagaaagtatcagaaatacatagtctgcacggcactctgattttctccattaaagtggcaatttcataataatggctgaaccttccccatatacactttgcgctgacaaatgtcccttatgtttaactacaacaatatcataacaaatgctcaaacctaagccagttccttcgccaggttcttttgtcgtgaagaaaggatcaaatattttatttatattttcttcttcaatgccagtaccatcatctcttatttctaaacaaaaatattctgattccttataagtcttgatttttattctaccttttttatctttgattccgatgtaataaattgaattttttataatattaaagataacttgttcaatttggaacctattacacttaatataatcatcatcaattaagcttagctctaagtcaaataaatcatcaagtttgtattctttaagttccattctcaaaattttcatagattcttctattaattcactgaacttattcatttcaaaattatcgtaagcatcttcattagaaaatctaatgatatttttaattatgctgcttattttttcaagaccttcatttgtctccgttataactggctcaaagtctgataggataaattctaatttacctctagaacctaatagctcttcaagtgcttttttatcagaaaaatattcttcattttctttaataaaagttaaatatttatctaaatattcttttagagttttagcataactttgaattgtatatatatttgaagtaacatatcctaaaggtgtattgatttcatgagcaattccagctgaaaaccttcctatagtagatagtttttctttatttaccaattcaatttgtgttgttttaagctttgcatttgactccttaagttgagcattagtattttttaaattattataggattccatcaaagcattttgatattccctcatctttattgctgattttaatctggatgcgaattctataggctcaattggtttattaatgtagtcattagctccaaattcaaaactcttttccaagtattttttatctgttagcgacgtaaacatcaaaataattacattcttattatttcttcttataatctctaaggtttctattccagataactttggcataactatgtctaatagtattatatctatattctgagtatttacaatttcaatagcttcttctcctgatgctgctgttataatatcgcatttaatttcactgattttaattacctctcttgccgtcattatgttaaactttgtatcatcaacaattaaaatattcataattcccaacccctaatctgcaatttttagacctgtattgatgtttattaagaacttgtcaggaactatagtaatcttgcctccaaatattttgcttaaaccatctaggaaatttagtataagcttagcttctggcttactaatagtctttagaaaattatttttgtttctaatgaagaaattaatatttaaagttgtgttatgcataaaatttaataatagttcttcttcttttgaatcccaagtaataacctctaaaacattattaaatattaactcaaacactcgcttattacctaaataattaatttgagctgtattattattatcataaattataggtaattttctgctttttaactcatcaaatctaggctgtaatgaagttaaattaaaattttcagaaatacttggaacagtctctaaatactgaaaatatactttatctattaattcactaatgtgtttttgtgtagaacattcattatttgaaccatcatacatactatttttcaaatcaaatattattttcgaaaccactttaatataattaatatctttttgactatttttcactaaattattgttgctatcaaggatcttcttatataacttattcttttcttctatttgaactttaaatatctcattttcttttactaagttataatattttaaggcttcacgaatagccggaagaaattcctcttcattattccatggctttgtaatatatttaaaaacgcctactttatttactgtagctattacttgtgatatttgagcatatcctgaaagtaccattctaactgtgttaggagatatttctttaactttctctaaaagttctaagccattcattttaggcattctcatatctgtaactattacagcaatctcattttcttgaaactgttctaaggctttttctccactacctgcaaaaagcgacttaaaatcttcttgaatagttattctatttattgaatttaatatattagtttcatcatctacaaaaagtacattaaatctatccatgctaattcttcctttccactaagttttttactatctgttcacatctttcttcagatattccgtagttttccaaaacccctaggctaagctttggtttataatttggatttattatatgccaagaataataatctgcaatgtaaatcattgatacgagctctctatttgcatcgctgcttaacataggattatggtgatataacgcactttcgactattgcatacggtatatcccaccattgtagtagatatccgcctaattcttcatgatctattttgaatttttctttctctaaagtacttatctcacctaaggatttatcagctgctaatttataaatatcatcatattccttatcatatatcttaaagaaagctacttttcctatatcatgaagaagacctgccgtaccgtaataatcagggatctttttacctaaagctttgttatatagttctattagtatcttattagttaagtttgaatgctcccatatttcatttttattataaaaatcatttcctgatttaaaaacttctgcagttgccataattgcctttaaatttaccagtccaaggcttaatactgctgtctttattgaagctgtctttatcccataaaaagctgaatttataattcttaggacttcagaacttaaagttatatctgcctcaattaatcttactatcctatctatattgtgatcatcatgttcaacaacatcgcttatttcttgtagtacagacggaattgtcggaagcttgcccatttcttttatatggtttaaggatatattattatgtaataattcctcagttttaaaaacctcatcaatagcccttctaaaatcatcctttttccaaggcttagttataaatagctttgccaaattattatagatagatttaaaaacagtcttttcatctgtaaaaccgcttaatattaatcttgttacctctggatataataatttaactctttttaatagttcatacccatccatttcaggcattctcatatcacttactattagatcaatatggtttttttcaagaatatctaaagcttctcttccaccatttgcaatatatacatcataaggactatcaaaaaattctcttcttattgaattcaaaatagctttttcatcatctacaaataaaatagacttactcattttgggtcacctctccctgttcttcatgtctaataggaagttttatagtaatctttgtaccttctcctaaaacactgtcaacaatcaaatctcccttatgagtattttttataatatcataggcaatacttaatcctaggccagtacctttacctataggttttgttgtaaaaaatggttcaaatattttatctaaattttccttaggtatacctgtaccattatcttctataacacaacttacaaataaatcatcactaaaagtatgaatttttaataatccaaagtagtctagatccgccttctcttgtttttcctttatagcgtgagaagaattaataataagatttaatataacttggtttatttcactagggattgcttccacttgtggtatttcatctagttcaatttcaatattagagttatatttaatttcatttttagctataaccagagtatttgttattccatagtttaaatcatattgttcaaaattcttttctacagatgaatgagcaaaatttctcattgcggctattatcttttgaactctttcaattccaccttcagtatcctttaataattcatcaatgtcatccattataaaatctaaattatattttctttctaaactctcaacatttgccacttcatctttaaccaagcacattccttcttctgaattagccagtaaacttttatatagcaatattatctcattaagcttttcaacatacttttttaaagttccaaaattacttatgataaagcctaaaggattattaatttcatgagctattccagcagatagatgacctaagtttgccaatttatcttcttcaatcatcataaattgagcattttctaaatttttaatactcctttgcaattcttcatctttaagtttcaattgacttaggaggtttaccttttcttcaatattttcagaaataataagatatttcttaacatttgaattttcctcaaaaatttggcatatagatacctttagacaaaatacagaattttctttatttttagcataaatttcaccattccaattttcaaatagaaatagatcgcttatttgacgtatcttattatcctctgcataactactttcaaaataaaataaatcattaatattcatatttttaagctcttcctcagaataattccacattttctctgttgaagcattaaagaattctaattttccattagaatcggtaattagtaaagactgcttgatatttttgattatagtctcaaataaatatttcatttccataaaaactcaaccccatttttaaatattcttttatattactataatttctacatcaaataccaaaatccttcaactttacatttatttataacttattacacaataaattatattctatctttagaaatatctttattttttctattttttgtcaaataaaagtaacttaaacctaaaaacttatataaaataaataaagctgagactttctaaatacgagaaagcctcagctcaactaattttctattacactttttgtgtatcctaatcagatatcatatgcatttttaatttcaagaaataatcatttgaaatttgaccacttaaatttattagtaagcacttgtttaacttggtacttatattaatggcttagaagtacgcaaaaatatgttgtatttaaaatctcccaagtatagaaacctaacttttgattgtgtgataatgacttaatcagcgaacaaacgcgagtaaattttctgctagagcttatttcatttagtacttgtcacactaaaagtagaaacatgaagttatggaatgcaatcctcaatttagagctttccagcgaaaatttttcctgcaattcctaatgcgctacaagctttagggaatcctacatatgctgcacattgcaaaataatttctaagatttcttcttgttttaatccagctttaagagcaccttttatatggaaatctaattgttcaaatgcgccttgtgttataagggcagttattgttacaatttctcttgtttttaaatccaaatttggtcttgcatatatttgaccaaatccaaaagaaatcattttatccaaaaagtctggaaatatctctcctacagaatttatcatctgttcaccattttcatctgtcatttgttttaacatattaattccgttttcataatctttattcattttactatccccttttcatagttggtggtatttcatttggatcaaccataacttctattagaattgcttccttatgtaaatttgaaatttctaatgcttcttttaattcaagttcattgcagcatctatatgattttacaccaagtgattcaccaaattttttaccatctaatggtacattataattggtccctactgtctttccaaaaaactttatcatagctttttctggcatatctaaccttccattatttattactataaaggtaactggaatattataatttgctgctgttgaaatttcagctccctgcataaaagtacatccatcaccagttatgcaaacaattctagaattatagtttgctagttgtgctccaattgagtaacctatggcatgtcccatagctccaaatacgtcatcaaaaaagaatgtacctggttttctgatattaaaatatcttattgcataaaaagaatgactaccatcatcgccaaaaacgacagcatcatctggtaatacttttcttattatttccatagcatgagcagatgaaagatacttattgttttctttaatattatttttaaattcataaatctcttctaataaagtatattcttttcttctcttatctttagctttatctaatactagatgtagattagctttgatatcgccaataataggtagagttttaactggtaatgctttttctatgaatgtattatcataatctaaatgaactacttctttaggataattgtctggtgatattcctactaaagacatatcggatagtttacttcctatgactatcattaagtctgtatcattcttaatatattcacttgatttatctgtaccgcctaagcctaatgcgccaagtgataaaggatggttctcagaaaatgttccttttcctcctggagtcgtcataactggtatgtcccaaatttcagctatgtttttaacttcttcgtaagctagacttgaatgtactcctttgcctgccaatataacaggttttctagcattatttagtttactaacaaattcatctaatctcgaggatattagtttatccatattgttaggtaaatcaagttcaaattcatctatttcttcatcaagtatgtcaagaggtattgataaatgaactggccctttggcacctgaataagctttttctaatgcatgttttaataatatttgaaactgatcagctctttcgactctagcactaaatttagtaactgattcaaacatcctaactaaatctgtaccaaaaattgttgaatcttgtcctatagcttttccaacattatgcatagattgctgcccagtaataaatagtactggtacatggtaagctttagcctgtcctgcagcagttagagcatttgtaccacctggaccagaagttacaagagcaacccccaatttcttgttaattaacgagtaacctgctgctgcgtaaccagcgccactttcatgtttacttaaaataaaattaatatcttgtctatccaattccataatcaaagaagcaagaggtcttcctggtactccaaaaacattattaatcccccattttctaaaattggatactaaaatagatgctatgtttctcatatgtatctctccttttataattaatattaatattaatattaatattctaaaaagtaattttggaatattaatcatcttatctgatgcccagctacactaacacttatatgcttcctgaatcaagttttaccttattccaaactaattgctgcataaaatcccatacgcacagctgtaccaacgttcccaactttttcacaatcgcctataaacctagtttttgtataatattttgcttttattgcctctgccagtttattgttcattaccatgcccaaggcattaatcatactatcagcttttataaattcagatgaaccatcatgtgtttctatataaacgccgttactatcaattgatgtaactttgctatttgtatgaattttcactccagatttataaagcataggtattaatgatgctgcattaacaaacaaagcatcctttgcaactgaatctgacatttcaataatcgtaactttcttaccatattcagtagctagttccaaagcactatcacagcctgataagccgcccccacatataacaatattttcaccttttaataattctttatttttatgtacctcaattaaattaataatatttaaaccgtcgataccatgaatttgaggattagctggaactgcacctgttcctacgatgattttatcgcactttgctaatatctcatcagcagcagaaacttctgtgtctagttgaattttaacattcaatttcttaagctgaacaccataccaatctattaatctgcataacttattcttaaaagcaggtgtcgaaactgctgcaatctgtcctccaattactttttctttctcaaatagagtaaccttatgtccctcaattgcagcaacacgtgctgcctccaaccctgctggccccgctcctataactacgacgttttgtggaattttagtatgcttaatattaaaacgcttttcattacaagcttgcggatttacagaacaacttaacttagtaaatctagctgcaatgcgtcctatacatccctcattacagcgaatgcatggtcttatatcttcacgattaccacacataagcttattgggcagttctggatctgctattagaggacgtccaaacatgacaagatcagcatttccagattctattaacctaactgctgtttcgggcgtatgatttcctgaattaagtattggaagattaacagctttgcgtgtaggctcacataaatattccatacatgcatctcccaaatatgaaggtggaaaaacatattcaattgcttcagacgatcctgcatctatatctattgcatcaactcctgcctcttctagtagtttaacaagatgcatactgtcttctatagtacgcccaccttcaaagcgatgatcaagtgacatacgaaataatattggcatatctggtccaacagcatttcttattgaactaacaatctcaataggaaagcgagctcgtttttcatttgttccaccatactcatcctcacgtttattccatattggagacataaattgatctattaaatcgccagcatgtccatgtatctcaatagcgtcaaaacctgcatttttgacatttttggcagaacatgcaaattttttaataattttttttatatcgtaatgactcataggcctacaattaacttttctattatatgctgctggtataggtgatgctgacatcggtggctctccatattcgtttggaagtgcatcacgtcctgtaccacaacataattgggcagctattcttgccccgtatctttgcacagtttcacaaagagtagtaagttttggtattacatacgtatgctctaatatacctgaaagaggaccttgtgctatatcatgtgagataaactgagcgcccataattataagtccagctccgcctcttgcacgttcttcataataatcaatttcatcatttgaaatagtaccatcactattggatgcattaattcctataggcgaaaaaactattctatttttaacctccatgcttccaattttaaatggtgtaaataacttcttatagtccataataactctgtcattcccttctggatacctatcacaatctatatagatacattaaataaataactcactacttaaatagcttagtttataaaattttttcatatattacttttataaatatcactttaaaaataaatatcagaaaattcaacattaatggcatttactaatccattatctgaagatataaatgctctatttttctcctcaaatgtaacttctttaataggtagggttattgtgaatttactgccaattcctaattcactttctacctcaatgcttccttctaatatttctaccagcatctttactaatgctaaaccaatcccactaccttctgcctgtcttgaaagattattatcaacttgtccaaatcgttcaaaaatcacttcacgcttatcttctggaatccctaccccagtatcaatcacagcaattgacactgttttattcttcatattttctgtaatttcaactgttatatttccaccttctggtgtgaattttatagcatttgataaaagattcaaaattatgcgttcatatttttcatcatctattgaagtatttatactatatgtgttagtcttaaatccaaacgtgattttcttttgctccgcatatatttttatagactctgtaattaattgtgttataaatacaatatctatattttggggggttaatttaaattgatctgcttttaacttagtaatatccaataaattatttacaagcctcaactgcctgaaagcatttcgctttatgcttcctattaagtttttgactgattgaggaatctgattaatatatacctgttcaatcaattgaatagctgaataaattacatttattggtgttttgaattcatgagtaataagggttataaattcatccttcatcacaaggtctttttctaaaagctccctttgctttttttcggattcatataatagttctttttgcttattaatcttacgattttgttttctaagcaatagctctcgttctatggcatcaactacagtagttaatgtcattaggaaaaatggattatggagtataacagcagtcattatacatatagttccaagcaaattgtcatcatctgaatagtgaaatggtactccataacatgcgctcttctgtaaagaattatgataatgatcctttcctattatctgtattggatgattttgtttaagagtcaaactaacaacatttgttcccatatcttcctcacgaaattgaatacctggcttaactccaaattcaaacattgtttcgcctatagcttcgtccccaagaatttctaataaatacccattctcatcagtaatagtaactaatataggcgtaccttctaaagatttaatcattttattgccaaaaaatttaacaacatctaaaacttctttatatatatctttctttttagctaattctaattctgatatagcattaggagacactctaggtttgttgggatctaatcctaattttctacacttcttttttgattctataatataatcagcttcttgttcatctatatcttgcaacgtatattgcctcctcaaaagaaatctttagtaatttatgtatatcaattcacttttttacataatttacccaactattatatcactaagtttctattatcggaatatttattctaattaatttcataatttacaataaattcatatatatattatattttgcattcataaagtcacaaaaaaatataaggatgcaaccaatgttgctcaaaataattcaaattagcaaaaacaattttccaaccatttttattattctcttatttcataacaattgtcttttagaaaatcttttaatgcatcttaactctatgcctaatataaattgttacattgttaacttcctttgtttttaaattcttaacttttttcctttttaaattgtaaaaaagttttatttaaaccaatgttcattcaaaaaaatatttaatggaaacttacttttaagcgcttcgatctatcatataaaaaatattactattatttaacttaatccctcaatcacaaataaaataagcgtaaatgctaatcaatttcttaattaatgcttgaatatattgattttgtataatcgtaaaacgaatattatgtaaattaattgattgttttccattatagggatataattaattgtacggtaaaaagacaaacttagtcgaatttaaatattactatctaagtttcatataccaaaagaaccacaaataaagctaataccatactgttcttggctaagttcgagaaccaaatatagtaaaggaagttaagtcgcttaagcaacttaactaagttcgagaaaccaaatgtaaaatttggactctcacttattacttattacttattaagtatttagttagggggaaaattatcaatgataaacaaaaaaattagtaaattattaggaccagttctcggaattatgggatttatgttaaccatgggtgcattagaaatgccagctttagcagatgataatgtacaagcaatttcttcttacacaagtagtacaacttcagctgctgcaacttataaagattattcagttgatataaataagagcgttactcaaaatggattaaaagtaacattagaaaaggcaacggtaacaaagcataaattaaatgcagtaattaaagtagaaagcacacaaccttttgataaaactaaaaatgataattcgataattcaattactttatggtgaaactcaacgaggcagcgaaagcatgtcaacagattttatagatgatcaaactctattaattactatagatcaagatactcatgacgaagaattccctaaaagtggtaacataaggctagatgtagtatttcctaattataaagttaacataggaatggatgcaaacgtagatttttcaggatcttttaataacataattgaaaaagatttatcaacaaaaatttctggttctgacgggaccttaaataaattagaatctgatgttttaggaacaacagttacttatagtgaacctcaaaaagaccatgatgataggtatatggattcttcaatgatcttaaaggttggcgataaaatgtataagttaagatcctctggaagttcttcagaggataaagtaataaaaggaagatatgaatcaaagacagctacttatgatattcttaaagaccaaaaagatataagcctaatacctttaacttgtaatataacttgggacgaatttagaaaaacacatgaaaatgttaataaaaaagaggatacaaataaagaaacaactaataatgtaacctattcaaaatctttcgatttctctgatggaagtaaaggagaaatatataatattgaaagaaatgataatactgtaaaagtatattgtaagggaagttcagaaaaggcaagtttattaatggcaagtagcatgagtatgtattataattttacagaaggtcaagtttattactctaattatgatagcgataaacatatgagtttttataaagatccaaatgttgctcttggatatatcgtagagtttaatgatgtagaaaaagataaatcattagatataatttccagagataatatagaacaaatagatagatataatctaggaagtgaaatacaaatttctaaaaaaactatagattgtatatttctatagtttttttattaaacacccattaatcttaaaactgaatttatgatagtaaaaatttcattttatttagaataatagagtagcttttatgctactctattattctatttttataaaagtattcttatagcttaatttgctccttcgttgcctttcctcaatattaattttaacgtttaatcttcatcattaatttctatttgctcctttgcccaatcactgagaccttttaatgaaggaatcaatttcttactattctccgttaatgaatattccacacgaggaggcatttctaggtattgtatacgttttactattttatactgttctaattcctgcaagcagttacttagtgacatattagtaattccatttagttctctttttaattcattaaaacgtactacttcttttttggttaatatacatagtatagtcaatttccatttaccaccaattactttaagtaaatattgtagatgagtatttatggacttatcctttctttcatcgttcataataaataatctccttagtaaaattaaatatacctagtcaaaaaaagttgagtactagtatatttttgatttagtaatataattatatcataatataaattttattttaaatgaaaaggagcaaaacatttatgaaaattatcgctattaacgggagtccacgtaagaactggaatacagcaacattgttaaataagtctcttgagggtgcagcgtcaaagggtgcagaaactgaacttataaacctatatgatttaaaatatagtgggtgtataagctgttttgcatgtaaaagaaaaaatgttgagcatggtaaatgtgcactaaaagatgatttaacccctattcttgaaaaattaaaaacagcagatgcagttattttgggttctccgatttattacatgaatattacagctggaatgaccgcacttttagagcgtttcttattttctaatagcatatatagcgatgaaataccaactgtttatcctaagaaaatacctgtaggatttatttacactatgaatgctacagaagaacaaattgatcaatttggagttaagcaaagttttactttacgtgaaaatatgattgcaagaactacaggaaatccactagaatcattatatagttataatacttatcaattcactgattatgataaatatgaggcttctaaattctctgaaaaagaaaaagcaaaacataaagctgaacaatttcctgttgattgtcaaaaagcctttgacatgggagtaacgcttgtcacaaatgcataatgaagcagtagctaatcaagctactgctctattctccgtttcactgttctctttaacattgaaacgtataatccaattgcatatcataaaaaactgctttatctatatgaattattctgcatgcttatacaaaatcacactttcaatataatttatataccttcttaattcatttgattcttctctagtaatttctcctgattcatacatattacgaactgctgaacgctctatatccatggctttaattcttagttcttccttttgttttatgctttcctcattatatttaaccacgtttcctttgaatctattaatcatggttctataatataaaattacgtcttgtgcagcgtttgatccttcatgacttcttagatattcctctaaggcttcaattgcagcttgaaaggattttaattgaatatcttttactaatttcaaattatctagcttgatttctttcctctttttgaactttttgtaaaaaatctttgttgctctcattaatttccttacaagaaacatagtatcttgactaggatttcttagaaagacttcttctctataatctaaagatttatcaagtgctttaaatacttgttcatcaatctcacttttacccattaattcattaatatattttcgttctgcctttaacgctattaattgtatttcaaccatttcttgttgattaaaatttctctcgactgcgtttgaagtttgctcaaatctaagattttgagatatatgtttatattcatgaattaattcataagctactgcttcatttttatcatttatttctgactcaatagctttaataccggctgataagagtctgttttttgcatcaattaagtttttatcaataatcttttcgtcttcgttcaactcatctttacataaaaatggcaagaacactgttgcacatattaatgtaaataatattacaccagcagttaaaaaaagtataagtgagcgttctggaaatgcatctccattatccaagaaaaaaggtattgatagaactcccgccattgtaaccgtacctctaacacctgttaaactagttaataacgctatctttacattaggtacttctatatctttatttttgcttaaacgatattcataaaaagctgaaatataagaccagacaaaacgaattgccaaaataacaaacccaattgcaataacatatccaatagcctttaaattccctatattgggatcagctattgtttcactcattgataaaggaatatttaatcctaataataagaatacaattccatttaacacaaataaaataatggaccatatattttctgtaagtacctgctcttccgctatgctagtttcaaatcttctgctaataagtgaattaacaatacctgcaaccactacagcaattactcctgatgcgtgtaaaagttcttcagtgattataaatattacaaatggagctaatatctgcagaagggagtgaaagacaacatcatttattccctctttacgtaaattaaatcttattaatgtcaaaatcaaggcaaaaatcaaccctaaggctgcccccgctaaaaataaatacgaaaaatttaaaattgcgtcttttaatgagaaatagcctgttactacagcagctatagcataattaaaggctactatacctgatgcatcattaatcaaagattctcctttaacaagatttagcactttttcaggtatatgaattctctttgctataccatttacagccactggatcagttggtgataaaatagctgctaatgcaaaggcagctgcaagaggaattcctggtatcatccaatgaatgaaatatcctccacctatagttgttaataaaactaatattaaagaatttccaaatattgaacgcctcattttccataactcttctcttggaaagtattttccatcattatataaaatcggtgctacgaataagagaaaaaaccattcttcttctaattcaaaagaagtgtgtttaaatgcaaatgcaataattacaccaaaaacaatttgtgtcaaagctgtaggtatagatggaacatagtgactaataatatttgaaattaataaacatcccatcaacaataatatcgtcattagtaaatccacttcatatcccctcctctggtctattttaacttatatgttattactattatacatgataaaattgctcaacaataacatttttttataaattagtattttaggtatgtaatcatatttctagtttgccctataaatataaaaaaacttactagctttttagaagctaataagttctattttatcgaagaaatttaatataaactattagaatgcttttactgattttaacacttattctttgctaaatagtaaagagtccttacaccaactcctgtaccgcctttagaacaatagctactttccttttcagtccatgcagtacctgcaatatctaaatgtaaccaaggcttattttgtacaaattcacctataaataatccagcagtaatagtacctgcatgcctgcctccagtattttttaaatctgctatatcggacttaataagttttttataatcatcaaagttaggtaatctccaaattttttcatcagctttaagtgatgcgctttctaactctttataaaactcatcgttattagataccacagctgttgtagtaactccaagtgcaactaatgcagctcctgttaatgtagctaaatctataaccttattagctttttccttttcaattatataatgtactgcatctataagagtaagtcttccttctgcatctgtatttaaaacttcaatatatttaccagccatagaaccaattatatctcctggtttatatgctttgccagatattaaattttcacatgcagcaattactcctacaacatttatctttagctttttctttgcaatagcacttattgctccaataactgatgcagctccacccatgtctgatttcattgaatccatgctgctagttggcttgatagaatatccacccgaatcataagtgactccctttccaactaaacctaatatgtcgtcctttttgctttcatctccaaaatatctcattacaataagtcgaggaggaagttctgatcctttagcaactgataggaaagattccattccaagttcattaattttcttttcatcgaatacttcaacttcaaatccatatttgtttccggaaccaataaccttttctgcaagagtttctggatataatacattagctggttcattaactaaatcccttgcaaatttagttgtttcaacaagtatcaaagcttcatctatatattcatctattgagtttggctttccattttcatcagtacagatacttacttcaatttccgaattttcattagcttcagtcttgtatttgtcaaatctatattctccaaaaccaattccttcaaccatagacttcgtaatatcttcaactgataacttctcattagatatcatatttaatgctatttttttagcttttaattcaattgccttttttattgcctttccaaaagagcctcttataatttctgttgtcaactcatccttgcttccaagtccaataaatattatgtcttgaactccactttcaactacattggtagccacacatatttccccagcattacctttaaatttattgctttctttaaagtgcttatatatcactgtaagcttttcatcttgtaaatctttattttcaccataaacaggaagcataactaagtcagcttcattaactttaattgtattaattttaaattccatactattccctccatctataaaagttagttgatattcgtaattttatatttactgttcactacgtgtacaaacactagaaatatttcattcctatatgttatagataacacaatcataagctatgaaatatcttccaactagaaataggtaatatatttttgtggaatgtttcattagtaattttgatggatatgattcttaattgaaattccaaatctatgatttggtcaattgaaattactcagtgaacgaagtgagtcgagtttactttgaactattccaaatgtgctagttcacagcttgttctttgaggctagcactttgggtgcaactttatagccttataatcacccatcagaattacctagaaactggaacaaaagtatattattcatttcggcgagttatatgcataagttcaggtcttagttgggttatctatattgaaataataaatctgcactaaatgcttacttaatcctggaatgtagaaacttgattccaacatgcgtattaaaattgtaaacagtatagatataatttgtttaagccttaacatctatcattaatgttacgcttttattgtagttattataccatataatacgaatatgaatactcttttccatctttattcaattggttcttttcaaaacaattgaaaatcatattatataagttataacttcaaataaagtacaacagcagcaaacttaactaaattataatttactacaatgtcaagctatttttattatactttctgaaatctttgccttaataggtagttctcaaataatgaaaagcactgcactaaatatatcgattcagcacaatgcttacatattaaaaatagttttattcaattatactgttgagctttaaagaatcacgcttacttgattttgtcatcattatagaacttctcatcattatttatctttttatctagataaattaaatattctcaaaacttcttctacagaattagttctactcattttatctataaaatcatcttgttctattattttcattaattccttcaaatccttcatatggcttttattatctattactgacatagttattattacctttaccggatcattttcaaggtttccaaatttaattggatattttaatgtcataatactaaagccaattttatatactccatcttctggccttgcatgaggcattgctattcctggtaaaataactatatacgagcccaatttttcaacattatttatcatagcatcaatataagagtcatttatgcaactgtttcttttaaggatttgtccaccttttactattgcatctttccagttttctgcttcttcatttagtttaatgtatttatcatttattatttcacttaatgaaggctgaattatttctttgtatgaacttaagcatgtcactatttctttttctaaatttgagtagttatttattatgcagttcttatcaactatatttagtatattttttatgacacttctttttgattccaaattcatactataatattcatcatcttcattaaaacattcagaaaaactttcttcactttcagactctttcttattttcaatatcatcaagtgcttgtgaatattttgaaaagaataagcttaactcactgatatttttttctgtcaaaaatggacttactaaaatacatcttatacctattatattaattgggattgttgttataattaaatctataggttctctttttgctatcttttcaatatcgtggcttgaaactgtatctattatgtttatgtcaaatatggatttaagctttattgatacaaattttgatgtcccagctccagtagcgcataccactaaaactctaggctttatcttgtttaaattctttatcctctctaaagatgccataaagtgcaaagttatatagccaatttcttctttgcttatttctgcatttaaatccttttccaaaaatatcagactttcttctactaaagtaaaaacttccttatatttatatataatttcatcaagaagaggattatttatactgactccatgttttaatctataaatcattggtcttatatgctgaattaatccttctaaaagatgctcatccgcttcaaaattatactttgtcctttttccaacttcacttatcaatgtagcggaaataagctgtatatatactagatcatcatttttttcttcttttaacattacgttacttccaagaagatgtattgtcatatacccaatttcactttttggtatttttatatcatatctattctccagcattcttgccattgcagaagctatagaaaattcacaagttttacttaaatttttaagctcattatcatccatcacaatatctttagcaagttcaatcctctttatggcaattgcaatatgaattaataaattgttaaatgaataatcagataatgtactttccaattgatcttctgcagtctttattacattaccaataaattctatatccatatccttaaataactttttaaaattaacaccaatcaaatctgagtcagctacattttcaagcataagattcgaaacaacttttctaagatttttctcatctccaatagcttttattcctttggatttttcactttgaagctttatattattaccttcaagtaattttcttacttctttaaggtcattattaatagttcccctgctgacgaacatattttcagccaggctgtttattgttagatagctatttttttctaataacttatagattatataaattattctttccttttgagacataacataatcatagctgtttatggattccattaagtttaaaagtctcttattctcatcttgccttaaatctattgatattccctcattaggtttcctaactaatggttttaaatttatttcttttaaatattcatctattctatctaaatcatatcttatacttctagaacttattttaaacttaagagcaatatcctttatagttataggtacactgctgtttgctatgagttttagtatatctgaacacctgctatttagcatattatacacctgcttttaataagatcactcacttttttatgactatgaaagaaaataactgccctaaatataccatcgacttgctattcctttgataataccttaaatattcattaacttaagcaaatgagttgaaagcttaatttactttcaacccactaatattatttatattgaagagaaaggatattatgtcattaagataaattcctttaatttattagaaatatcaatctaaattattaattgcttttgatttagtttttatgaaattaggaacaattaaaactactagtaatataacaacaatagctataacaccaaatttacctattaattctgatgctttaccaagtataatacctaaaactccaaaatcaaaatcaccaaaagttgtgttttggaatcctaatgaaccaagtacaggtaaaagtaatgctggtgcaaaagtaatcaaaagcccgtttacaaatgaacctaccatagcacctttacgaccaccagttgcattaccaaatattccagcagttgctccacagaaaaagtgaggtactagtcctggaattatcaatactcctcctgcaaatcctaaaagaatcatgccaataacaccaccaatgaaagaagatacaaatcctataacaacagctgtaggtgcataagtaaagaatactgcacagtcaacagctggtacggcatcagggataattctagttgcaataccttggaatgctggaataagatcaccaagaatcattctaacaccactgtaaacaattgttactccaactgcaaattttaatcctgccataagagcaaataatataggtgaagtaccatctgaaatagttgctacaaaagttggacctgccgctattgctgcaattaaataaaatatcatcattgttaatgcagtagaaatagttgtatctcttaaaaatccccatttctctggtatttcaattttttcagtactttcttcaggttttcctaccttagatcctacccatgctgaaatatagtacgctaaactaccaaagtgacctagtgcaatatcgtcaccatcagttacttttctagtaaatctttgtcctatcgcaggagatattgaactccatgctccaagtaagaatccaccgaataatattaattcagttccgctcatacctgttgtcccaagaacagctgataaaaggcaagccatgaaaaaactatgatgacctgttaaaaagacatatttaaattttgtaaatcttgctatcaataaattaattaaaagtcctacaattaaaattgtcattgtctctacgcctaatactttttgtgcaacagaaacaatagcttcattatttggaacaactccatctatatgaaatccctcttgtatcatttttccaagaggatctaggttagaggtaataaaatctgctccagcgccaagcatcaagtaaccaagtataggttttaaagttcccgtcataattttatgaccaggtttcttaagtgcaataagtccaacgaatgacataattcccattaataaagccggctgtttcaatacgtctctaaaaaactcaagaactgacatatacttcccccctatttatttaattccatatacttctttttaataacttccaaaacatcttctgttatcttctttttatttatataacttctcactaccgcaacatctctattatcaaactgctgagcaagttccttgacagtaattatcaaatctgccttcttcccttgtgctgaattaaaatcaattgattcaacattagcctttatattgttttccctgcatatttcctcaatcttcatagctaacattaaactgcttccaatcccattgccacaaaccgttaatatttccatttttctatctcctttataatattactaaaagtcttttaagctaatttaaaagctttttgaattaatataactaagaacatcttcttttgaagatgaatttcttacaatgcttaaaaattcattatcctcaataagtgtcataagttcggccaaggcttttaaatgcgaagtcttatctattgcacatataaaaatcaatatatcaacaggatcatattcttcattaccgaattctataggcttcttaagttttataagccccataccaattttcttggctccatcttctggtcttgcatgcggcatagctattcccttttcaataacaatgtattgtcccatattttttactgtatttatcattgcatcagtatattttgcttcggtatttccattcttaacaaatagacttccacaaaatcttatagcatctatccaatcatttacttcaacatttaattcaattgtttctttattaaataacttttcaatcatagccttgccaccttccttaatgctacaaaatagaaaatcctaaacttgatgcatccttataaaaacttcgtacagtttccaaagaatattcgtataaatcttttcccatagtagggagtttctttaatatatcattagttacagtaattatttcacaaccacattcatctgcttcaacaatattgtataattccctacagcttgcccataaaagctctacacctttattgactttacatagcttgctgctagtcatcataagcttaattggattagttccagcatctgctattcttcctgcaaatacagacacaatactcttaacttctggatttaatgaagttaccacatcttttacctgatccaaagtgaaaattgcagtaacattaagatggtatcctttttccgataactttttaattagcggaattgaagattctcccttagtgttcatgataggtatctttacataaacgttttcacctagttcggataaaacgtctgcctccctttccatagtctcgaaatcatctgagaaaacttcgaaagatactggtaaatctttaatttcctctaaaacatttttggcaaatttcttataatcatcaattcctgcctttttcataagcgagggatttgtagtaaagcctttaacaatacctcccttataaacctccaacatttcatttaaatttgccccatctgcaaatattttaatatttaaatccctaaaatccatttatctcctccatcaaattacttgttttactttataacccaattatatattccaagtaaccaccagtaaagctcaatatatttcatttcgattgtggcaattttgtagtttttaataatctattttcataagcttgtctcatttggtagtgatataataattattatatgaagctataatctaatggataatatgatttttcaaaatttatataatgaagtaaattaaaaactatatagaaaagaggaatatatttggaagtagtaaatgcaacccacaaaagtatcgatattttttcaaaggttttaaataactctgccacatggcttaattctattaatcagccaatgtggaagtatgaagatataacaagtgaggaattgctaaagaaatatagtattgatgatatgaaattatgctacgaaaacggaaccttaattggagtatatattttgcaatggtatgatcctctattttgggcaaacttacaaaagaatgaatctggaataatgcacaagttagctgtttgtagagaaagtgtgaaaaagggatatggacacaaactgatacaatctgctgaattaatttgcaaggagcataatgtaaaatggttacggttgaattgtggtacatttagagataggctgagaaacttttacgaaatcaatggttttaagatggtagacagagtatttattgataatagagatcaaattagatatgaaaaatttctaaatctatagaaaataagaatatgcttaaatattcttatatataattaaatgactttaaatttagataaacattatatatttatctatgaaaatatttctattataataaaccgaatttacatgcatttctgtataagcactcagaaagtttaacaataatagatttatactatgaaatatagcccaactagaaagcagaaacatttttatgcagtaggcatttgaaaataagctgttaaaagttcttaattgtagtttgttctactaatgcttgtcacaattaaatttggagcaagcattagtgatgcaaactgcaatttagcactttcagcgaaattttcatagtcctgcgaaataacaatgtttctgctttcggtggagtatggcataaatctaatgttgtttataaacttaaagctttttcatcttatccttaatcaagctaacataacttccaagcaccgcaagagttttcaccacttcatccagatcaaaattcaaagagtgtcttttcatttttagagcttcctccagcttaaaaagcatagatgctccttcctttaatccaaatttatcacaacttactgcgagtctattaacttctcttaaagtgccgtctaaagttacacttactccacttaataaaattccatccaaaagcatttctatgtcatcaaccataattttcaagtcttgattattttccataaaatcacatcctttatgtaattgaattaaataaactaccgtatacatattgatagctatattacctatcttttctgtaagataagaagacaaggcaagctaactcaattactatctacatagtcaaattcactaatgtaccatttttataataagctgttatagggactgcagtaagtccagtttcgttaaggtatactttagtcaagagcataaacggatagtttttcattctttccattctctccagcttttctataagacttttattattaatagaatacttaaccttaatggttacacattcttctttttcatcatataatggcattttgaatagctgctgtattttatcaaagctgctttctccaaactttaatggctttataagaaataaattataattttcttctctttcattaaaatataatcctgagttattagaaactgctgaaaataaatccttccaagaattaaaggtcttgtccttaagataaatactttgaatatctgtggtacctataatttcccctttgctattttcactagaagataacctaaaatctccatttatttttccattaataagctttactctagctttagagaagctttctatatcagaagcaatcccccaaggacagctttctctgctatagctgtttttattgttgtaggatgaatttctagatatagtgtaagtaaaccatttgttaaagccttctactgtaaaataaaatgtagttccttcatagcctgactctgttatccacttgctagctcctactgctgcaagttctataggaggaatttcataataagaacttttatgctctcccattaattctcctaaagttttttcgtcgctgtaattttccatagccatagttaatatataaatactttgtagcaaatacctaaaactttctacagaaaaagaagcatttttattaatatataatctaagttttccttgaagtgcttttatcttcttctcaatacttggaatatcgctattatgacaaataattgatacttgttccaacttatctaaaaagctttcaggaattcttgcaagacctgtaaaatatatttcctctagagtttttctaacttcttttatacagctttctaaagtttccttacttacaattttatccttagcaattaaataaataacttcttctttctttaacgtacctttgtaaagaccatagtgaattactgcctctgccttatgtctacaaagcgctttactcttgcagctgcacaaagcattattaactatactgctatcctttatggatatatctttctttttttcgccattcacagaaataaactttatagtttcttctcctgcaaattccacctgaagaagggcatcttcttttatatctgctcttaatccaaactccattctcttaacaatatttccaaattctctgtcacccaaagcagtttttatactctttaagtttatatttaaaagttctgaataatctggactaaattcttcatgttgttttgatatttccatttcttcactagaatccccatttaaagaagaggactctccaaagatttcttctatatgattttttatatataaataactcattacagcatgcttacaaatactccttgagggacagctgcacttaaaggcttggatatcttcatttacgctgcatgaatttccatctggcagttcacattttatagatgcttcttccactgtaattttaacaccagcaccagagcttaaatcctttgaagctctattaaatatacctttattagtaactccaataagatactcatcattaatagaaagaatatacgattctaacttacttaagaaattatctttgctatccatttcgctaaccctcctggcatcattgctgcaacatctgctccaagtgcagtcattttagctgcagccttcttatcatagaagccattcgccttatcatccaaagctgtaagaattataagcttagctccagtttcaattattgccttagcccttgcatacattatgttgtaattataaccgtcataaagatcggtcaccattaccaccatagttcttaaaggactttctactaatttttctgcataacttaaagcctttcctatattagtccctcctcccagctgaacactcataagtgtttgaactgcatcatccacataagaagttaagtccactatttctgtatcaaaaataaaaaggctggtttttaacatagggagctttgaaaatatgcctgccattatagcactgtgaatgacagaagagagcatactgccactttcatctacagcaacaactatgttccaaggattatattttcttactctgccataaaaataaactttatctacaattattctctcttcttctttatcataattttttaaattagctcttatagttcttttaaaatctatgtttctagcagacttcacagcacttcttttgttcctgtccacttttcccataatagtaagctttacttcattttctagacttttagttatttcatcgactacttttttaactatttttcttgcagtatctaaaacttcgcccttcattaaatgtttcatctgcaatatattttttaaaagttctgcattaggctccatggcctctagcacttttttatctgttaaaagctccttcatgttatatttttctagagcatgcttttctaatatttccactgtttctttaggaaataagcttctaacctttgttatccaagaaggcactgtaaacttagagcttcctcttcctcctcttgggtcatctactcttattcctctttcttcatcataatccctatcatataagaactctagcaaatcactaagctctgagtaattgctgctatcttccgaaaagcctattctatcctctgcaaactttccaagtactaatcgccatctatttaaaccaattaaatcttcattcataccttaccctttctcttttaaagtaaaacttacacttagcatagttatttttacctcatataactgttaacttagaccaattaccatcacataagccatttaatctacactttatctggagtcttgcatatgatgttttatggatagatattccacttcttcaaaagctctactgcatatttatctaatgatactgctaagtttatatcttcttcttttaaagccttttcatatagaatattatcatcatcagtgctgtacacttttgctgcctctttagcaatgctgtcaatttcaaaaggattaaagaatgtaaaactaaatctcaaatctggaagaagtgccatgaagtgttcctcttctatgtttctcataaagctatctattccattaagtaaatcctcttcaataagtaataagtctttagctgtagaaaatagtccttttaaaaagcttcctgacttcataagtttttccccagttccataaagatactgcattgccttatctgttacttccttagaattaatagaatttaatccgtataatatacctaatgctgctccttcaactgcgctgtttagattcttcttattaataagcagttttaagctgtcgattaaggtttcactatcaaaatcagctttattagaaatatgataaatatcttttagcttagatataacttcattttcattgtcataatctacagtgcttaaacttgttatttgagatacagctttattataagcagcagtaaagaattctttaagcttttcattcatagtaatgttaagcaaatcctctgaattacataaaaaatttagattgtaacaagaatttgtaactgatacaaaatcttcatctccatttaagatctcaccaaatgaaggaagaagtccctgaaaactgctttcaacgcccataagtgtagcttctattaaaagcagtgaagcttctccagatacattttcacaagagataaacctctttgtaagtatagaactcgctgcctcctttaagctcccgccatgcactgaaagttctataagtgtactttgaagtttagtagtccatttatacttccatacttctcttactaaattggtatttttccttttaataaaatcaggtcccttttccatgaaacaaaagttagtatttaagaacttcattatatgaaaaaacttactttgctccctatgttttttactcttataaatacttaatggcacttcattttctaaagtagtggtttttatgttaaactttctgcacaattcattaaaatcttgtactataggtggcacttctgctaatgcacatagcttacctattttatttcctgtaagcaggtctctcaaatattttaaagaaacttgtgcctctgcatccatttcaccttttacaaaagaagatgttatgccatccttaagctcataaactccacattcatacttgtttcttaaagatttaagtccctttgccatattaaaggcttcaatttcatctgctgtagaaagatttccatgattttttcttataagtttcccacagtgtacaatataattaagaactgcttcttcgtaaggcttatccatctttttctgaatattttcaaaaactcgttgataaaaagcaggatgaggcattccactggcataaccatttaattgatcactttcctcaaaggaatagaccatggcatatactcctgtgtcctcttgtgctatattatgaagagttatttcctcattagattcgagtccatcaataagagcagaagtatgaaatcctccgcttactacaagaactttattgtattttttaatagcttctcttattttcatactcataaatttttctctagaaaggcatccatcttctttaagcatttcttcattatagctttccctagaaagatagcaggaaaatatcatattttctataaacttctcagtacttatcttaagtccatctatttcgaataatttttcccaaagctcattataatttctgcagccttccttttcacaaagggttttaataaaaatactttccttcattaaataatcatcattataggtatttttctcctgagcttttcccataatctctagttttttgctgtttataagtatttcagcatatgataaatctatgaactcgcaagcaatatttttcttttttccttctcttaatgctaaaagctctggcgaaaaatctaaaaagggataatagcacctatacttttctttattttcttctataaatgaatttctatcaaaataactatagtaaatgcatacaggagttttagtttcctcatgagctatatattttattactttattggcctctacaggcccttcaattaatataatttcaggattataactctctattacctttttcagatgaaagctacaggcaggactatggtgtcttactgggaaaaacattactttgctttctaaactgtaagcttttttcacatagttttttatcttattatctatatcctgattgtctatatttttacccattctagctccacccttatttaatccactttttagcttcatagaaatccttccagttaccacccatttttgtacttttacctttaactacaatgttaaaataactccttagcttatccacatcttcacggctttccttaaggacagaacctagtatgttttgtaccatagtactcatatcaattttagaatctccatagtaaaagctgctcataagagtttgataataaactgacactgcctcagctgtactcattactgcagaaggcttgtcaattctactaccttcagaagatatcccttctcttaattcatgaaatgttgtagcaagaatttctgctgcatctctatccacttccatatcaatatttgaattcctaataagcttttcaacttccccttctataatcttagcttctaaagaaacatcgcttattgggaatacagtttcaaaattaaatcttctctttaaagcactgctcatttcgttaactccacgatctctagtattagcagtagctataacattgaaaccagaagatgcacaaagcagcccttcttctccaaactctggtatatttaaaactttatcactaagtacactgattaaactatcttgtacctctgctgggcatctagtgatttcctcaaatctagttataattcccttttgcatgcctatatacaaaggagaaggtactaatgcttctttaactggtcctttagctaaaagcaaagcataattccaagtatacttaatcatgtcctctgtagttcctgctgttccctgtatagtatttgtgctgcatccacaaatagcagccgataaaagctcacttaacatggttttagctgttccaggctctccaaccagcataagtcctctatttccagctaaagttataatacatctctcaataagagtatcatctccataaaatttctttgtaatattaacattctttctttttagctttaaaggcttactgcttcctaaaataaaagtccttacagccttaggagataatctccagtttgcaggtttaggcccgtcatcgttagcttctaatgcggctaattcctctgcatataatatttcaacggtaggttttaatgcttttatttcactcatatatactctcctttattcttccttttagcccgcgatgtctgctgactcaaaactaccatttatatttccgctgactataatgcagtgtcctgcaaacaagtctccatcaaaaaagaaaatctcaaactcaccttcaggataaacacttatggtatccaactctataaatttaataaccatttcttctgtaacttcgtcaatttcatcctcttcatcaatccaatcattggcaagttctaaaagttcacttgcagcataagctctaattctatcgctccaatctttttgatttttgaaaagctcatgagcagttttaagagaatctttcattctttcttcctcatctagatcaaaatataatcgtccttcttctcctgcccaaatgatatcattctgaaaagtcttaatacctttatctaattgaaattttccaaggatttcatcttcataaaatactggtttaagttcttctgctaatatatcctgaagctccttatccttatagtttgcatccatgagctccacaagcatgaaggatttttcgccttttctaagtttaagtttaattattgaatttcctttaatagtcttttgccattcctttaagccttcattatcagtaagccacgatagattaatctcctcttttactgatggctcattgctgtttaaatccttccaagcaataaggtttatagaagccctccataactcttcttttcctcctttgcctgcaccaactcctagagaggatgttacagcagctacctcaaatatctcctctttgaatctgctatcaaaggtttttatctctttatttttactcatactttcctccttatttctcttctctccatttatcattgtttcctgttttagaaaccaaagctctactcacttgataaagaatttcactaaagaatctctcaggcagtgtacctatggatatagtattttgtttctgtgttttctcatttatatacgcatacttagacatggttcctaatttataaaaacacaaatcatatactgttacttcttcactttcatagcctacagatacaccgctgaaatttagtcctacttccactttatgattattgtcttctttataaaaagcataataaccaccaccatcgccaatggctcctctaatccatccaaagtccgttaatttaccaagtaaggataaaccatttaacataactccaccaaagcgctctacagtatttctatttctttcttcttctgtaacagtaaatatttctctatttaactgttcaaatggctgtttgatttcatagttttcaaattgttccttccacaaagccatgtcctcattatttaattcaatagggtgaacaattcctattatcattccatcttctaattcatactcttcttcatcattagtattaaagctgccatcttccatatatctaaagctatcagttaagacatcatctttataaatcccccagacaagacctatagcaaacttatgcataataggattttcaacaaaaagttttatccaagattcttttgtccattttctattgctagataaggccatttctagacgaatcgcttgtatattagcaactgtttttaactgcttcttcaaatttttaaattcttcagaagcttcctttgccttaacttcatcatccttcttagctggagttggcaggcttttaagctttttgccactttcatcagttatttctaaagtaagctctggagtaagcgatacaataaattttctatctccataatcaaaaattctttctcctcttacatcaaagcctaagtttggaactatcctatcagaaagctcttctatgtctattccaatttgctctgccgcaaatttaagagctgaagctgctgcatttttaacttgcttaaatttaaactttcttgatatattgtctactattatcaaagcctcattacttccatttagagcaagagccttaactgcttcactagctattgcacctcttgaattcttaggccactcttctatattctttttaagcaaacttattacttcatagtctccataaactgaagcaaatggtagtacccattttctcttactttctgcacctgcatccagccacctttgtagaatttctaaagcaagtttagataagtcctttttatctaaaagttctcctacctttaaagcttcactacttaatccaatttcaatacaggaagcataacatacaagcatatattttataatttcactttctgcataagcttcactatccttaaactttatctttgtcaaagtatcacaattcagccatcttagagttgctgctttattcccttttaaaccctgcttacagtattttaaaatatctaattcttcatttttttcttccaaagcattttctaaatttaaagcctctcttataagcgcttttatcttttcacttttttctacttctaaggctttgtttaaggcttccataactttttcatcactactctttaaaagcacctttactgccgattccctaactgcctgtttttttgaacttaagctagttatcaccatctgctgctttatcttgcttgagcttaaaagctttattactgtttcctttacgactttagatgaatcgcctaaatactctataagaatttttgcacttttagtctcctcaagagttttatttaaagtttctaaaattccctttctactttcagaatcacaattagtgatattttctattacctcttcttcctttgtttcaattaacttttctataattttaactgcttggctgcttaagctatttctgacgtaattaccaaatgcacaatgtcctaaataacatatatagtttttaatagatgctccacaatttacaagtagttcaatgtaagaattcaaatcatcttctgatgctttttttccctcgtatttaagataatcattatacatatttcttaatatgtctggatttcctatggcaataaatatatccatagcccttgaaaacatcaaagattgatcttttaaccaaaatagaattttagaaaaattaaatgaagacatgtacatatctcgttttctaaataagccttccaaagacttatctatgtcactaaaagagatatttccttctaagtattgtataaaatcttcgtaaacctctctttcaataccattcttgtccataaacgtagaaaattcatgtataaaagcatcttctgcatcatttaggaattccttgccttctcctttttgccaaagaatgaaggccatataagctttattcatgccaaaacacatttctgtagcttttttaaattcttctatgtgtttatctgattcttcctttaattctttttcataggtatagttataatttaaattgttagacgctccaagccatgcgatgtaagattcttttttaatttgaagcgcatccacaaggtttgatattacattatatctgttatattttagatagttatgtaaatcgtaaaagaactctttataatcaaattctgcagcaaatttagtaaatcttcttgatatttcagattcaacgcatatagtacaactagttcctatcaaaaacctaaaaatatacttattaaggtttactactaatctgctatcattctttaaattttccactatgtcttgcagattggaagttccttcctttaaatattcaattaatgcatctttctgcatttcagatatactattattaaataaatttcctatggattcaatcatgtcattttctaaccactggaaatattctttatctttttccttgtaagctaaataagttattattatagctttttcatttatttcgcttatcttaatagcttctaaaaatgaatctctatacttttcataaagactatcataaaacaaaataaatccacgatctaaagttctttcctgctcagtgatagacgtggcataataagctataacaaagactggacttaaaccgtattttaaaaactctttataataagaagtcggtttataataacttgtcttatctaagacaaaaaataaagaagacttgcccatctgaaatagtattcttaagtattttgacaaataatcattagctttatgcttgactaaagaatgatatacactaaccactgcctctaccgcatcactctttaactgtttcatatctatactaggaagattattaaagaaatcctcttctttgatgctgccttccacatattctttaaaatcatcaataacttcatacgttaagcctaaatctaaaaacacattacttattttttccgttaaatgctgctccaatcccattttacttaacactcctcctatacctatacttcattaataatttttataccttctatcttcatcttactttccctacttaacaattatgtattgtctatatcttattttttgagattcttctgaaatattgataattatgattaaaatcagttcagtattttaggaaatatcttttaaatatcattatttgttacatcactataaattgtcacgattgataacttccatgctacaccttcataaacattagtcaaaacaccattctttaaagccgaataatactccattccaaaactgcatattattttcattaccgtctataattgcacttttgcatcctcaaggattatccacatatttttttcatcataatcttttacctttgcagatactaagtgattagggtataagttctttgcttctgagtttctggcacattcttcgtaatcagcaatagcaattgttttgttctctaattctataatcactccttgagggtagaacaccttcaatattccttcaacttcttttcctttagtgaagtattctttagcacgcaaccaatcttctaaaatgcatttgctatgaatagaccatacctcctcaaactcattttggcttactacttcatccaattcatttgtttcaattaagccttctgctaagaaaaatcccatatcattatcttctctatttgaggctatatatctgttatcacatatcattatttgtctttcagcatatccatttactatttccatatacgtatcgtattcttttccattctcaaaccattcccatttgaactttatatacattgaatcattccttacttgaaatatatttccgccatttgctgttacctcaaccgtctcataatttttacctatccattttccaattagctgtaaaaccagtcttagcttctaaagttctgtccacatcataaagtatctcgctaaagaatctttttggaaccttcattggtacaattgtattctcatcagttacttcatcataaacatagcttcctctttcgaccgtacttgctttgtaaaaaacaagttcataaatagtagtttcttcatcttcataaccaactccaagatactcaaattgaagctctgcacctattcctattttttcatcttccttataaaactgataatagcatcctgcgtcttgtattgaacctctataccatcccattttagtaagcttacctacaagtgaaagcccattaatcttagttccggcaaaacgttctatattcttcatttctttctcttcttcagtcacagtataaaccttcctttgtagttgcgggaaaggctgtactatttcataatcttcgaattgctgcttccaaccttctaacatttctgtttcaagttctaaaggatgcacaactcctataaaagaattgtctataagattatattcttcctcatcaactgtattaaaactaccatcttccatatatctaaaggtatcctttagttctccatcttcataaatcccccataccaagccaagagaaaaattatgcataatgggattttctacaaaaagtttttcccaatcttttttcttccatagtctgtttactgcaagagccatttctagtcttaagctttgggccgaaacaatagttttcatctgtttctttaaagctttgaattcatttgctgcctctttagcttttagctcatcatcagatttatttggttttggcatagtcttaattacttttccagtattatcagtaatctttaaagagaaatctaatccgaaacttacagtaaaacttctgcttccaaaatcaaatattctttctcctcttttattaaaacctaaatctggtattattttatctgctaaatcatcttcagttaaattaaacatctttgctgctgacacaaaagcttctgctgctgcttttttaatctgtttatgcttaaattttctagctatactatctattattatcaaggcatcatcactgccatttaaagctaaagcttttactgcctcacaagcgatagctcctcttgaagtttttgaccaaacatctatttgagtttttaatgtatttactacattgaagcctccaattgctgaaactagagctagtacccatttttgttttgtatctgcaccattattaatccaaagatttagaatttcacttccaatggcgtctaaatcagccttattgcacctttctattaccttttctgctgtaagatttctttctaccacattttcaagagagtatttacttataatataagttattacatcctttgacaaaacatttccatcttcatactttacgtctgtgaatccttctacaaccgtccattctggtgcagtatacgaagttttcttgagcctctcactgcagtaactacttatactattagcactttcaagtatttcggtgtctaaataatctgcatttacaatgtttaaaagtaaaatcttaactttttcatttttttctttctccgcaaatttttcgatttctgctttaaattctctcatatcaaaattcattaagattttagcagcaatttctctagttgcagtctttttgcttgctaaaatccctaaaacttgctttttgcatccttcataagaacttagaagtcctgcaattttatctctaataaactttgaattatctgataaacttctaactaaaagttcagaatatttttccttattagttttaaataaagcctcaagtacaacttcttttgactcaccttttaaatcctctgcaatatttataatctcagtattttcttcattacataacatttttaaatattccttggcttttggatttaaaactgcatcagcaactagaatcaagtgcttttcaattataccttcacttaaaagtttttttgcaaaacttatgtaacttatatcattatatccagtcacatatgatataactgaagctactaaggcatattctccaatattaactgatatatatataaatctatgtataatatctctaatttcctctatagaatacattaattgaaaacaaagaccatgatatcgccatatatagccactatgtccatcaaatttctcagtcctatgaaaaaagtcctctaataaatcttcatttttgccttctaatacatactctagtattttagctttttcttttctctctaaaacttctaatgttctatcagaacatatgaaaagattcaaaattattcctatagcattttttaagttttcaagatctacttcttccttagagtagctataaataaaataagcaagtaagaatacttctaaatcatgaaaattatcttgaccaagcttctttttctttagagcttcaaaagtttctctaaaaactaaaggtatttcttttatcctttcttctatctcttcacgtatcttcttattttcttctctaacatatatacttattaatctatgtacatatagctttttatcaatattaaatctatttgcaatatcataactttgtgctgttttatcataaaaacaaataaattctactaattcgtaaaataacatttttctattagtgcttttactaatgatattgcttacaacttcctttaactcatcacttttatcgcaagcataagagaaaaaatcaactaaagctgtttgcttatcctttaaatatttatttatattatctgcatcttcaaaattatgttttataaattcttcttcattctctggtaaactacagccatttttaattgctaaggctgctaatgacaatttagtaaactcgtcttctgcttctaaaaaagtttttgataatatttccttgtcttctgataccatttcttcaacgattgtaattacttctattacatttctgcgataaagacaattttttataagccataatagaagcttttccttatgttccataggttttaaataatttacagttttagatacagaataaaatcttccatttattatttgaaagaagctctctcctcctatagcaaagaatacatttattattcttttaaaaatttcttctttctctataaagctgtccattagcttccaaaaatctgctcttatgttatagtgacttctaagagccttttccatattatatttattaaattcttctacgtttaaagaattttctccactttcaatgtaagctttaatctttataatttcttcatcttttatagtacagttacaaagtttaacctttagtaaatttaataattcatccatttatttttcccccatttatatattctaaaatttaaaataaatcttatttcagcgagctatattcataagttcaagtttaatctgagatatttatatgaataaaattataccatacctttctatttatcataataattgtagtttaaactaaaatatgttaaattgttctttcttaaattctcaatggtttttctataaattcctatatagtttgtcttgttgaaaaattatatatctaaagtgtgttccgtaaattttataatataaatgtgcattgtgttactcaatcaaagcttcatcatcacctaatatttgatcatcaatggttgtattatgtaacattactttaattacttctttttgatgcatgtaaactttaccataactgataaaaatggtataatttaagacataataattaatatactttgttaaagagttaagggggagttttttatggcaaaaattatgattgcaccaagtaaatacattcaaggtaatggagaattaaaaaatattgcggaatacgtatctgtacttggtgaaaaagcattatgcttgattagtgaaagtggcttaaaaagggtaaaagatactatagacaaaagttttgagactaaaaatataggcgtaaaatatgatttatttaacggagaatgctctataactgaagtaaatcgtattatcaaaatttgtgatgaaaatcaattaactgttctcattggtattggcggtggaaaaattattgatactattaaagctgttggatactatgcaaatcttcctgttgtgattgtacctaccatagctgctacagatgctccatgcagtgctttgtcagttttatacactgatgatggcgtctttgataaatacttattcttaaagcaaaatcctaatatagttttggttgatactggtattattgcaaaagctccagttcgtcttttagtatctggtatgggtgatgccttagcgacatattttgaagcaagagcttgtgaaaaatccaatgctggaacatgtgcttttggtactactactattacagctcaagcattagctagactatgctatgatacattaattactgaaggatataaggcaaaacttgctgtagaagaaggagtttgtacaaaatcagtagaaaaaatagttgaagctaatactcttcttagtggtcttggatttgaaagcggtggtattgcagcggctcatgctatccataatggtttaactgtattgccagcttgtcatcatatgtaccatggagaaaaagttgcatttggtacattagctcaattagttcttgaaaatgctccaatggatgaaattgaagaagtattagatttctgtactagagtcggtcttcctgttactttaaaacaattaggtatcaatgaaataaagccagaagaaattattgaagttgcaaaggctgctacttcaaaagaagatactgcacataatatgccatttgaagttacccctgaagatgtctacgctgctattttaacagctaacagattaggacaagaatatatgtaataagtaaaaaatttgcaggcggataagatttcttttttgttctttttagaatataaaaactattcaattaattttttaaagttgtctgcagattttactggaataaaaattcataaaaaataaagaagacttaaagtaagtacacatttactcactttaagtcttctttatagtaacctaaacatattttccagaaattttatatatttaatgataactatatattaaattattctaaaagtcttaatttcatatggctttatagtaaagatgaatttttttagttctgtaaccctctatattgaaaatattaatgtgtaatctttaatattaatatcttcaccaatggtatctaaaacctccatgcccaatatgcagtctaattaaatcataagaatttattaacagattttatgtatttccaaaaattttgtattaaagtttccttttctaaaagtttcattatccattaattttttgtgaaaaggaattgttgttttaactccttcaataacaaattcatttaatgctcttttcattcttagaattgcttcatctctatctcttccccaagcaatcacttttgataccattgaatcataaaatggtgaaataacgtatcctggataaactgcactatctattcttaaaccaattccaccaggtgataaataattttcaacccttcctggacaaggaataaagtttctagatggatcttccgcatttattctacattctaaagcgcatccatttatcttaacatcttcttgagtaaaagataatttttcaccacttgctactaatatttgttctttcataagatcaatgccagttatcatttcagtaacaccatgctcaacttgtattcttgtattcatttccataaaataaaaattattatcctcatttaaaagaaattcaacagttcctacactattatactttatagctttagctactcttacagccgcttcacccatagcatttcttaaatcttcatttaatgctggtgatggtgattcttctacaagcttttgatgacgtctttgtattgaacaatctctttcacctaaatgaactacatttccataattatctccaattatttgaatttctacatgtctagtatactctaaatatttctccaaataaaccataggatttccgaaatagttttgtgcttctttttgggcagtttcaatggagcttattaattcgtcttcagaattaaccactctcattcctttacctccgcctcctgctgatgctttaactataactggatatcctatttcttttgcaattgctattgcttcattaatattttgtatttctccatctgtcccaggaacagtaggcactccagctcgcttcattgtatctcttgcattagatttatcacccattaaacttataatttcaggacatggacctataaatttaattccaaattcctcacacatttgagcaaaatttgtattttctgaaaggaaaccataacctggatgaatagcatctactttagcatgtatagcgacactcaatatattttgcacattaagataactatcctttacaagtgttttaccaatacaataagcttcatcagaaatttttacatgcaatgcatctttatcagtttctgaataaatagcaactgttgaaattccaagctctctgcaagcgcgtataattctaacagcaatttctcctctattagctatgagaattttcttaaacatatctttctccttttcaaatcacttacttactttttatctcaaatagtggttggccgtattctacaaactctccatccttaactaatatatcaactatagttccttgaacgcccgcttcaacttcattaaataatttcattacttcaatcaacccaacaacagtgtcacattctacctcatcattaactttaacgaaggcttgttcatttttttctttggaagaatagaaactccctgcaaaagcggctttaatatattccttctctgtaatttctggctcaacgtcctcattgatacttttctcaattttagactgagcatctttaatttcgcctttagtaaacgtattagtaccagctaaaccttcacatatcttattcttatctattattatcttgctatcttcatgttgaaattcaaagtgagaaacctcgaatttatcaacaacttgcatgattttttctatatcctctatattaatcataatttcacttcctattataatattgtaagtcttattgctttttttagttcatcaatatatttttctctttcaaagtacagcctttcagcttcctttaatgtaatctgtttaaatttaattttactattaggttttagttgaactattttttgaatatctacagaaactacgtgagctattttaggatatcctcctgtagtttgcctatctgctaataaaataatagggttaccgtcaggtggaatttgaatagtcccaacagaaacttcttcagatatcatttccaatctttctttaagttctattttttctccacataaacgatatcccattctatctgatttattatctacattaaactctgaattaaaaaatttatttatactttcatcagaaatattatcaaattgcctgtctttaaaaactctaataattgtgctattgatattttctactgttgaatccccaatataccaactgggagctacaaactcacctttttgagttatctcttgcagcttttctattattttaatagctgctacacttttagtaccaatatttaatatatctccctttttcaaaggtcttccattaaagcctccaaattgtgctcttaaatatgtacttttactttccataacttctggaacggcaaagccgcctgctatagctaaataagaacgacatccagctatacacgctccaaaatttaatacacagtcttcctttaaataaactggtcttcccattggaattttctttccattaatagtaggtgaaatatttccacctgttatagaaattaaggctcccttttctaactctaatgagggaccaatcattgtaatttccaaaacaccttcattttcatcatttccaactgcaatgtttgcaattttcatagcataaacatccatagcaccgctaactataaccccatatttttgatatccatgtcttcccaaatcttgaatagttgactgcagtcctggatttaaaacagatatactcactattcttcctcctttaactgtacatattcttcataagaaataggataaaacttaactatatctcctgcctttaaaaggcttttagaatttctctttaaatcaaataattttaatggtgtctttcctataagctgccagcccccaggagtttctataggatatacccctgtctgcattccagcaataccaactgaacctgctggtattgctattcttggagattcacgccttggagccgcaattttttcagacattccacctaagtatggaaatcctggagcaaaaccaatcatataaactagatattttccttcagaatgaatttttataacctcatctacagtaatattatttatttttgcaacttgctcaatatcttgtccaaattcaccgccatagcacactggaatttcaactatatgttcttcatcttctaaagaaaaatcaagtttagatattatattatccaaaataacttttaccacttcataaggggattcactcttcatatccaatggattataaatgacagaaacacttgtaaaagctggtacatactccaccattccataaaaaggtttctcatcaagataagtacaaaaggttcttacttttttatttatatcctcactaatttttcttccgaactcaaccaaagctgctgtttcacttatttgagaaattttagctttaaaattgcttttttccatatccatgtttcacccctttagacctttttcctaattttatttatttttcattatccctatataatatttaagctaattctctgtaaagtctttgaactcttttccctataccgcagacaaactcataattaaagcttccagccatattagctaattcctcaacataaataatattttctccatctttcccaactaaagttacttcatcttcaatcttcacattatctatatgtgtaacatccaccatcatttgatccatgcaaatccttcctataattggtgcatatttaccatgtatcaatactcttccctttgaagaaagagctctaggatatccatcagcatatcctacagaaagagttgctatctttgtttcattttttgtaatataagttttcccataacttactccatgacctgcatcaactatatttacatttatcacatgagttttccattgaagcgctggttttaatgtaatagcatttttattaacttcttcagatggatataatccataagtaattattccacacctcaccatatcaaagcgatgatgatcaaattccataattccagcactattacacatatgcttaataggaatatttatatctctttcttctagtaaagctacaaatttatcatatttgcttatttgcaatttactataacttttatcagcttcatctgctgtagcaaaatgggtaaacaaaccttcaactactaaatttgaaaaagttaaaatctcctgaacttctgctattccatcttcatttgcatcaaaacctattctagtcataccagtatctagagcaatatgaacttttgcttcttttttgcatattgctcctgcctttgacatttccttagccatttcagtattatacacagtttgggtaatattatttttgactacttctatatattgactaggtgaggtatatccgagaattaatataggtaattctattccagatttacgtaactctagagcttcctctaaagtagctacaccataataatccacttcactcttaagaaaatcacctaattcagcagcgccatgtccatatccatcagccttaattattgccataatcttcacatttctttctattcgtttttttgcttcatttatattatgcaaaatagcctctaaatctatttttgcataagttctaaaatattctcccataaaaagccttctttattatatattaatatattttgtgtagtggaatgatttctatattttcttcttcaaggctaagcttaattttttttacaaattccaatgccttagctccatctccatggacacatatagaatccactttaattggtatatctttacctgtaatagatgtaaccttgttttcttttatcatcttaataactcttttaatagcaacttcttcatctgtaatcatcgctccttctttagtcctcgcaaccaaagatccatcttcttcataagcacgatcagcaaaggcctctcttgctacttttaatccaatattttgtgcggcatttatcatttcacttccagataaggcaagtaaaatcagttcaggattcacttcatatataccttcacaaatagcttcagcaagttttaaatcctttcccgccatattatataaagctccatgtggttttacatgctgcattttaattccttgggctctacaaaaagaatctaaagcaccaatttgatattgcaccatagctttagcttcttttggagatacattcatatttcttcttccaaagcccactaaatcaggaaagccaggatgagcaccaacgctaacgccagctgccttagctagttttactgtatagtccattacaagcggatctgctgcatgaaatccacaggctatgttagcagaagatatatatgaaatcacttcttcatccaaaccaagtttatagcttccaaagctttctcctaaatcacaatttaaatctactttatacataattacccccgtttgatcagttatgagttaagcctcttaactgaatttaatgtctatatttttagtatccgttataagcatatggccaggagaatgtgtaatcactattttaggtttaacattcataaccacagattgtggtgtcacaccacaaggccaaaatactggaacttctccttcttttatattaacactatctccaaaatcgggcttgctaatgtctgaaattccaataacagaaggttctcctatatgaattggtgttccatgaacctttggcattgctccagtgaccattactgatttaacaatttgatcatagggaataggtctcatgcttacaaccatttttccattaaagatccccgctggttcacactctatattggttataaacattggcacgttacagttttcttctatatgccttacaggtactccagcctctaaaagctctgattcaaatgaaaagctacaacctattaaaaagctcacaaaatcgtctctccataaatgctcaacactcgtatattcaccagttaatattccatcttcataaactctatatttaggtatatccttagctatatctgcatcttctgcaatatatcttaaactcctgcttcccacatcactaacttctaatataggacaagcttttggatttctttgactaaataataagaaatcataggctaactcctttggcaagataaccaaattagcttgtgcatatccagcacacattcctgaagttggtcctgtaattttaccttcacgtattaaatttcgaacttcactcggtttcatcttagaataatccataattatccccttcctaatacttattcctatatcactacttgcaaatcattcaatgtgggcagcccctacacaacattttcataaaaacctaattcaataactttatcaaaccaagtagcacaggtatcttctaatttaatagaataagatacacattctctcatcaaattaactattgaaagattcattgataatccaaatccatctatagcaggtacaagccatccatacatatctatcattccacttcttgaagctacaatcattgcttcttcttgtaactcttttgtatgtagtatttctaaatctttctttaaataagctattgctgcaattaatccataacatccccagtcagaaactgttgcagtaataatattatctgcctttgtagctactgcaattccaccattacatccacaattacattttcctttagctgcatatggaatatactcttctaaatgttcactaatagttcccataccaatttcatttccaagatctcctattgctatattaagaacacccttgccctgtaatttagtaaataaaatatcttgttttgcctctaattcagttacatttagtcctactgcattatgataaacaccaattgaatttgcccctggacactcaatgctaataacagcgcttggtaatcccttagctatgatttcatcagcctgcttggcagctacattttcatcctttgtaaatggtatagctgcaatagatataggatattcttttaattcctctatgctatcatataagtgaactcctattacttgcgctaaattttttacagcctccatattatcttcaggacatattattacaggtttgacattaaaagctttaactaaagctctagctaatatcatagagctaacaattccatccatctcagcctttttaaaaggaagaagtacaaaaccagtcattatatagactaagtcgccatcttttaaggtgttcaccaatttttttgctgcatttgtagttaaaggctcttttgtatactctcttgctgcagaatataaaatgcggcatacaccatatcccctagggtctaaattcattaaattatctaaattctctcccaaattaaatattgttaattcttgttgattcatattctacctcctattctgtttttgtttcttctaagaactcatttaacaatgcatcttgtaatttctttacaagctctggtgcttttccccctacaggtattccatctatttcactggttgccatacaaaattgacctgaactagtaactataacttcatctgcctccattaattccttcaaggtaaatgctgtttcatctacaggaatattaaaggatttacacattttaataaggtgagctcttgctatacctggtaaaattaaattgtctgttggagcagtttttaatataccatccttaataattgatacattgctatgtgcacattcagttactctatcccctctatgaaatacagcttcctgacatcctgcctcttcagttttttgagatgcaattacacttggtaataaatttaaggttttgatattacagtgtaaaaatctagtgtcttctaaagtgattaactttaatttttgtgacatatccttaatatttaaaggctttaacataatccatagatttgcagggacctcatctccaggaaaagcatgatttctcattccagttcctctagtaatttgccaatatacaaattgttctcctgaatcaacctttaataccatctccttaaggatttcttttacttgctcctttgaataaggaattttaattcctaataaaccagcgctgttgtaaaatctttcaatatgctcctccaatgcaaaaatcttgtgatttctgctataagtagcatcataaactccatctccaaaatagcaaacacgatcaagcattggtactgtcatttcctctaataatccaaactttccattataataacctaaattctccattgtattttcctcctaaaattcttaaaataaaaaaccagacatattttagacctttgaatttgacttcttcgtctaaagtatatctggtttttctttgaaactaatactatattcatatagtatatctcacagaaatatttttcaatattttttaaaattccagttaattttattgttatttactacttaaccaaaattttttcttatattttaaaaaattcagttataaacctcaaatttttaatatgcatatttactcttctacctctggtattacactaaatgtattttttatattttttaaaacaaaatgagttttagttgctgatactccttctatgctttttattgcacgatgaattttctcaagatgatcagatgattgacaaattattttaagcataaaatcataatctccggttaaataataacacgaaacaatattctcattacctttaatagctgaagtaaatttatcatagaactttggatgttcaagactaacttccattaaggcacacacatcattatctaattttttttgatccactattattgtataattttgaattaccttgcttttctccattttatgtatgcgttcaaggactgctgaaactgacaaatgaatttcattacttatagaggctgctttaattctagcatttgatttcaaacactttaatattttgtagtccattttatccataaatatctccttattaagaattcattcttaatttaatatattctttaatatatttaacacaatcttcaattcctaatttactagtatcaagagataaatcataattctttacatcttcccatttgttccccgtatgataataatagtagcctcttctatatttattcaatttcttaatttgcttagcagcctctttttctgaaatacataaactttccatttgatgtttaatacaatactcattagatgcatgaataaaaatcttaaatacattaggattatcctttaaaatataatctgcacaacgccctattacaacataagattctctttctgctaattccagcagtatcttagcttgataattaaataaattatcatttgaagtaaaatcattactttctggtggaatcaattcaccttcatataccttctttgacaccatatatagtaaactacttttaacatgctcatctgcatttgcaaatagtgattcattaatcccactatcctccgatgctaaacgtaataattctctatcatacatattaattttaagatcctttgaaatcattttacctattgttgttccaccacttccacaagttcttgtgattgcaattacaaacttatccatattgcctccccctttatttaatagtgtaaattacttttttatcttttcataacttactttacactatcatttcatatgaccatccttttattctcctaagtatgcttttctaacagaatcgtcatgtaataaatcttgtgctaatccttctaatacaacactacctgtttctaaaacataacctctatcagctatttgaagtgcagcatttgcattttgctctactaaaagaattgttgttccagctttacggatgttttttattatttcaaatatttcttcaactacaataggagcaagacccattgatggttcatcaagcaataataatttaggttttgccattaacgctctccctattgcaagcatttgctgctcaccacctgacatagttcctgcaagctgctttcttctttcctttactcttggaaacaatgtaaatacctcttccattgatactttgatttcagatttactctttcttaaataagctcctaataaaagattttcttctattgtctgatcaccaaatactcttcttccttctggaacttggctaagaccataagatactatcttgtgtgctccaatattgctaatcattttcccatcataagtgatttcaccagatttaattggatttaaaccgctaattgctctgagtgtactagtcttcccagcaccattagctccaattaaagttacaatttctccattatttacttctaaactcaaatcgtgaatcgcatgaattgcaccataagatatattaatattttctacttttaacatattattgtgccgccccctttcctaaatacgcttcaattacttgtggatttttttgaatttcttttggaatccctttagcaataatttcgccaaaagaaagtacataaatgtattcacatacattcattacaagtttcatatcatgttcgataagtaaaatagatattttaaactcattttttatccagcgaataagttcagtaagttccactgtttcttgaggattcataccagcggctggctcatcaagaagtaaaagcttaggtttagctgctaatgctctagctatttctaatcttctttgtttaccataagggagattactcgcaagctcatctgcactatcgtctaatttaaaaatttttaatatttctaaagcctcttgcttcattttttgttcctcataaatgtgagctggagtcttaataatagatgtaaacaaactagattttgcttgaaagttaaaactaatcataacattttcaagtacagttaattcagtgaaaagtctaatattctgaaatgttctagcaatatgctttgatgtaatatcataaggtttagttccatcaatacgttcaccatttaattgtatttttccttctgttggtttatatacaccagtaagcatattaaaaagagttgttttacctgcaccatttggacctataagaccaattaattgatgttccccaatttccatatttacatcagaaacggcagtaagaccaccaaattttattgttaatttttctactgaaagtaaagacatactactcaccagccttttcgtcttgaactatattttttgtagagtttttcccgaatttcttaaaaaattttattatattatctactgtaatttcccttgttccaagaataccttgtggacggaaaatcatcatgagcacaagcataacagcatatattaaaatacgatatgtcttaaatacctcactaagtcctcttagacattcaggtaaataaataagaattgaagttccaattacagttcctgataaacttcccattccaccaagtactacataagttattaactcaattgactttgaaaatgcaaagcttgctggatcaataaaagaattaaagtgtgcatataagcccccagcaagaccagccatactgctacctataataaatgcaatcatcttgtatttagtagaatttattcccatagcttctgctgctatttcatcttctctaattgacataattgctctaccttttgaagaatgaattaaattttttagtattgcataacaaagtgctacacctattaatactattaagaaagaagtgcttcctggtattcctgaaatccctctagcaccaccaacataatctacattttgaattactacctttactatttctccaaaccctaaggtacaaatagctaaataatcccctttaagtcttaatattggatatccaattagcgctgctaaaattccagctaatatgattcctacaagtaaggcaattggaaagggcatattaaaatttttagtcattattgcagatccatatgctcctattgacataaaagcagcatgtcccatagtaaattgaccagtaaaccctaatataagattaagacctaaggctgcaattaaaaaaataccaatttgtttcataattctaagtatataatcaccaattattccttggtttacaagaaacattagaaacacataaattaatgcaaggacaactgttgtaatcatatatctagtgtatgtggttttaaccaggcttaagcttgtactattttcatttttgcttatcttatttatcattttcatcacctacaccttcacattgtttttcttaccaaataaacctgttggttttacaataagaattataattaaaattgaaaaagcaattgcatctgataatcctgaactaatatatacctttgataaagtctcaataagtcccattgcaagtccaccaaacatggcccctggtataattccaatgcccccaagaacagcagctacgaaagatttaagtcctggcataacacccatagcaggctcaagtctaggatatagcataccaacaagtacaccagctgtggcagctagcgctgaacctaaagcaaaagttaaagaaattactctattaatatttattcccattaatgctgctgcatctctatcataagaagttgctctcattgctctacctgttctagttttatttacaaggtattgtaatgcaacacataatataatagtaatagcaagtgctattatttgaagattacttattgttattgctccaattttataagaaattaaaggaattacttctggaaaatttctagtatttggacctgcaacaaaatcagcttttacaaagttttgtaatataagttccattcccattgtggttattaacaatgttacattaggtgaatttctaagtggtttataagcaattctttcaattaacatacctaagacagcacatgaaaccatagaaaaaatcaaacttggaataaatccaagacctaatacagttgctgcaaagtaacctaagaaagcaccaaccatataaatatcacagtgagcaaaattaattaatttaataattccatataccatagtgtagccaatagctattaatgcatatacactacctaggcatataccatttacaatttgttgtaataaagtactcatgtacacctctcctttataaaaggctatatctctaggtctacttaaattacagcttaccccattaatatagccgctaaacaataaaatttaattttctttagaattatttaacctcagtttcaaattcaaattgtccttttacaactttattaataactacactcttaattgggttatgtttatcatcgaatttataatgtgtggttccacaatctgcatctaacttagccattgcatctttaatagcattttcatctgtgctgcctgcttttttaattgcttctgctaaaatgtatactgaatcataactaagtactgagaatgcactaggatcaccattatattcttttttgtaattttcaacgaactttttaattgatgcattatctgattttaacgataagtgatctgtaaagtaagatccttcaattgcatctcctccaacttttacaagacctggatcactccatgaatcactacctaagaatggtgcctttataccaatttctcttgcttgttttgcaattaatccaacagttgagtagttatctggaagataaattacatccacatttaattcttttatttcagttaaaaatgctttgaaatcactttctcctgcattgtaagttttttcatatgctacagtcccccctgccgcttcaaagtttttcttaaattcttttgaaatacctacacaataatcattaccaatatcataaagcattgctacttttttagcttttaaattttctgacgcgaattttgcaccaacttgaccttgtaatggatctataaaacatgctctaaatacataatctccaccttcagtagtaactttctcatttgttgaccccggagtaatcataactacttttgaatcttttgcaactgctgccattggaattgaacatttacttgcatatgttccgactactgccgaaactttatcttgcgtaattaactttgtaatggcatttggcgctgttgctgcttgattttgatcgtcttctgaaacaagctctaactttttaccaagaactccaccagcatcatttatttcttttattgcaagtttagatccgttttccattgctgcacccaaagctggaacatcaccagttaatggaaatactcctccgatcttaattgtatctccactagctgcacttcccccatttgaacttactttagctgtctcactacaccccataaacattgttgctgtcattgctaatacagttactacccccaatattcttttgaaaaatgtctttttaatcataaatatctcctccaaattttcaatttttttatttaatactagtcctgttttatacaaaaaaagcgcctataaaatcttccttgattttatagacgcctttgtcatatagttaatatttttaatcctattttattgttttcaccatattatgcataataatatttacttttctattttgaatatattccaaagaattattgtaagataattttttaacgttaaaattattgtaaaaaaaatagctggtgttattaacaccagccattgtgtataaatctattatacggtatgttacacaattgtcaataactattatgagaataattgtaatttcaaaaatattttcagttttttcttaatattcaatatttttttcgctttgtataattattgttataagttcatcagctgcttcttccttagtaccatacttgtttaccatattgttcagataattctttccttatgattcattacaataggaagctgtacttacaacgctacgggttaaaataatgtaaataatccaatattttcattgacttttatttatgtagtacgtacaattatcaataaatagacaaatttatggatatattgagtaattttgcataataaaaaatttattgaatctaatgttatgcactttattatagaaggtggtacgtatgaattataaagtaggaaaaagttcaaaaagtgatttaaatgaagcagtatcagaagctacccttgggcttaaagcacctaaattaattttatttttttccaatgttgaaccttttgaagaatatactaagaaaatgaaagaaaaatttcaaaacagtattattattggctccaccacatttgcaggcttttgcatggatggagcttataaagattcactgatggtaatgggtattgaggatggaattgaatgttatgccgatatattagaagaggtagataaatatcctcttaaatacatagatagagtgactaaatgtgttaataattttcgtgataaatctaataccatatgctttgaaatttctactgctttaataagctgtgaagaactagttttatctacattaaattcagtccttgacgaacataagattcccctatttggcggatctgctggtgacaaaggtaaggctgaaaaaacaatggtttcttttaacggcatagtacacaacaatacatgtgcttttgtaatcatcaaaaatttaagtggtaaaatcagattatacagagaaaatatttataaaaaaactgctcattattttactgccactaaagtagatacaagaaatcgtatagtacatgaatatgataataaaccagcagcacttgttatggctcaagcattaaacaccactgttgaaaatcttccaaaatatttagatagttatcctttaggtagaattatcggaagtgatctgtatattacagcaaaccaaatagttactaaaaataatgggatgtcataccatgcgaaagtatataataattcaaaaatggttctcttagagcctgatgattataagaatgtaaataatgaaacaattgctacagtgaaaaaagaagttccaaatccatcattagctattatggttaactgtctggcaagatcaatgcttttcgaaacagatgggtatttaaatgagtttgctaaaaatatgggcaatgctttaggtaactatataggttttgcaggttatggagaacagcttagagatcaacactttaatcagacaatggttcttgctgtatttgaatagaatgaggtaatacgatatgaagttttttaaatttagaaaaaagaaagataaaaacgaagaagaaaatattcaaaatggacaaaatattaaattagatataaaaaaagaatccaattatgataaatatgttaattatggcattttacatatggaaaagaaatttggagaattcatggatgaagaagttagagttactcaatccattaaggaaatcgacaatacatattcaaaaatcaatgccatacaaaatgtaattaacaatatagactctaattttaatgattttagccaatatgctaataaaattaatgatgttatgaatcgttctgacagttcagtaaaacaagcagataataaaatgggtacgttggcagataaaattaatggaacatgcactcagctagattcaattacagaggcctttcacaaattagaaaataactctagaaacattcaaaatatgtcaaatagtataacaggcatagctagcaatacaaatctcctagctttaaatgcatctattgaagcggcaagagctggtgaagcaggtataggtttttctgttgtagcagatgaaattagaaaattatccttatcaacaacagaattagttagtggaattgataaaagtgttaaagaattatatgaaagcatagattctcttagagaggaaattagaaattctaaaacagcaattactgataactatgaatatgctcaaaatgttcaaaaagatttcaaacaagtaactgattgtactattgaagcaaaagagtttagccagcatataattaaaggaattgagcgtacaagctctgagattagcggtgcagtaactggtgttgactctgtcactgagattgtgaattcattgggtaataaattagatacattaaatttaagaatgagcacaaggtcaactatcatctgcgatattataaactttatgcagcagattgaaaatttgctagctgactctattaatgatagtaatgaaaagtaattaaatatgccttaacttaaaatatagtttatatcatcaacaattctattattccatattttgcatttcaatataacataaatatattgaccccaagaaatagtgatttcttgtattatatataaaagctgagatttttccaatggtacaaatctcagcttttataaaaattatttaacaatatcacaagtttcatactatttgtatcttcaaaaccatttaatatgtctcacccattatgtttcctataaattgttaactttttttattcttaccttcttaaattcttaactttttaaattgtgaaaatgttttatttaaaacaatgttcctttaagagaatatcatacaatatatctttcacaaatgtttataaacttccgaatctatgatacaatcaagtgtaaaattatacgatatataacataatataaatgattataaaatttaatcatatgaaaaacgaggtaataaaatgataaaaattgataacttgtcgtactcatttccaaataaggatctatatcataatatttcatttactttagaaaatgatcagcattgtgcttttataggttctagtggtagtggaaaaagtacactaatagatataatcatggatccagagaactatatgtttgatggtactctagagattgatccaaattgcaggattggatatgtgagtcagttctgtgaggtagataacacaaaagaaacaacagttttcgaatatctatgtgaagattatattaaactacaaaatgagataacttctatttgcagcttaatggaaacctcttctgatattgatgccctactagaaaaatatcaggaagctttagatgctcttgatgtaatcggtggagatgattttgaaagcactcttagtaagaaattaaatcttgcaaacctaagtaaacttaaggattcaaagatatctgatttaagtggtggagagtttaaacttatccaagtaattagggaaatgcttaatagtccagacttaatgattatggatgaacctgatgtatttttagactttgaaaatcttaattctcttaaaaacctaataaattctcataagggaatgatgctagttattactcacaatagatatctattaaataattgttttaataaaattattcatctagaaaatcatgaactccaagaatttgatggaagttatatagactataacttcacattacttcaaactaagattgaacttcaagaactatctgttgctgatgatgaagaaattgagagaaatgaacgaataataaagcgactaagagatagagctgaagttacaggggaaactgctgctggaaggtatctaaaaggtaaaatgaaattcctagaaagattagaagctcgtagaataaaaagaccttttgttgaaattaagcagccttatatccgtttaactactaacaatcaagttgaagaaaaagttgctttaaaagttaataattatagtgctggctttgatgaaatacttttagaaaatgttaattttgagattaaatctaatgataaagtagctattgttgggttaaatggtactggaaaaactactttacttagagatatctttaaaaatgacaaccctgctattgaaatagattctgaaattgaagttgcatatttatcacagcttcaaggcgaaatattaaatgagtctaatacaatacttgaagaattcttagacgcaggatttaaaacttatgatgatgttgaaacttacatttcaaactatgattttgaagaagaaagaatcaaccaaaaaataaaagatttatctggtggtgaaaagaatatacttcaattagccaaaatttctgcaagcaaagcaaatatgctgcttttagatgaaccaacaagccatttagatatatattcacaaatggcccttgaagaagctatagaaaaatacaatggtgctattttaatgatatctcatgattactattccataattaattgcgtagattatgttttacttattgaagataaaacaatcagaaaaatgaatatgagaaaatttagaaagatgatttatgcgaaatactttgataaagactatttagaaattgaacaaaagaaaagagatttagaaattaaaatagccatctccctaagaaatactgattttgaacgtgcaaaagccttatctgaagagttagaatcattgattaaattgctttaagcacgataaaaaatggtatctgactaacatatattcttctttaaaggggcagattaactacatataattaaattaattttaaatatcataaaagaggtgtactatgatagcggaaaaaaagctcgcagaaaagcgattaacagaagcttataagaatgctaaaattgaatattttgataacaactctaaatacatatttttcagtgattgccatagaggtgatggtacaccctctgatgaatttgcaaaaaatcaaaatatttttttatttgcattagaattttatcttaataatgggtatacttatgttgaagttggcgatggagatgaactttgggaacactctaactttaaacatataagacttgcacatgatgaagtatatgctctattaaaaaagttctttgattctgatagattgattatgttatatggtaatcacaatgtacacttaaaatatagcaattatgtagaaaagaattattataaattctatgatgaatataacgaagaagaaatagagttgtttcctggtattacaccatatgaggcagtcgtgtttaaacataaaaacacaggtcaggaaatactaactgttcatggtcatcaaggagacagaatgaatgataatttgtggcgttttaatatgcttacagtaagatacttttggaaatttcttcactcaataggattcataaatcctgcaagccccgtaaagagttctgaacggattcataaaatcgagcgtatttatagtcattggattaaaatgaacaaaatcatgatcatctgcggacatactcataggccccactttccaaaagtcaaggaattaccttacttcaatgatggatcatgtgttagggcaagtggaatccaaggaattgaaatagtagatggaaaaattatgcttattgaatggagaatcagaactgattcagagggtattcttcatataaaaagaaaaatattaagaggtccagagaaaattgaaaaatttgacctaagaaataataaaactagtatgaaataagctataatatcagcaaattcttctaagaaatattatttattaaagctgagactttctaaatatatatattgcgattcacaatgcacatttcacaattgcggctaaaattcttgcaatatttttaaaattatcattaagaattatttttgcaatatatataagaaaatctcagcttataaaattactaatttactacttactgtttaatcttaggaattccctacaattttattataatctacaccagctttaattaaaagttgtttcactgactcactttttacattaaacaaagtatttttacatccattaaatgctccttgttctattttagttatactgtcaggaagaactatgtttgttaagttaatgcagttttgaaatgcactatgctctattgttataacagtattaggaatttttatactgcttaagtttgtacatccataaaaagtaccaattcctatatctataactccatcaggaatagttatgctgcttaaattcttacatccatcaaaggcactacttcctatgcttgttacagtgctaggtatttctatgctttttaaatttactcctccagaaaatgcattccatcctatatctgtcacaccatctggaattgcgtatttttcgtcaactttcccaacaggataatttaacaatttagttccatttttgctatacaatactccatcaacgctcttaaaagttatattgttgctatctacagatatattttttaagtttgtgcatcctgataatgcatatccatctatactttgtacactagcagaaatgtttatgcttgttaaacccgtacacccgaaaaacgctgatcttcttaaggctgttataccatttggaatcgttatatttgttatattcttatttagataaaatgctttatttcctatactttttattgcaacattatcaattttatctggaattacaacattgctgtcattacctaaataagccattattacaccagtttgtttataaaaagcccatgctccttctattgtgacattttgaaattgaccactactattaatgacattatccccaaactcatttggcgtactacctaacatatagccttttgtatcaaaataatataaacttccatcaattactctccagcctgtagcccatgaatttccttctgaataccaccagccttttttatcttgtttccattctgcatttgcacctattggatttagcattaataccgaagctactaccaaagcactagctattacttttgttaattttaattttttcatattatccccctatttttcctaaagttataaaataccattttattgtattttaacataattattaataatattccataatgttgtttattgttaacttttttcatttttaccttcctaactttttaaaaaggtaaacagttttatttaaacatttgttcctttttaaaaatatttaattaaaactttgaaaaatgctcattgttaacaaggtttatttaaaagaatgtttaaattttataagtttatttgaaaatacaatacatatattataaaatattttttgaggtgttatgatgaagaaaactattaatgttgtagctgcaattataaaaaatgataacggagaaatattatgtgctttacgctctcctattatgaaatcgccaaatctttgggagttcccaggtggtaaaatagaggttaacgaaactccaaaaaaagctattgaaagagaaatatttgaagaattaaattgtaaagtacgatatattaatatacataatgaaaatagacatgaatatgatgattttattgtaaatttgataactactaactgcgaattaataaatagctatcctaaagctaatgaacatgcagctttattatggctgaagccagaaagtctgctttctttgaaatgggctcctgcagatattcctgctgtgcttgaaataataaaaaatcatgctattatttagcatgattttttacactattagatatattaaatttagactaattgatttgttcattaatttgaaaattttctattcagataaagccctgtattaaaattttcactttatagataactattaagatttatttgttctttgaactcatctaatcctactctatctatgtaatcgcctaatctttctctgttagttgcattttctctatatacttcaataactttttctattaaatcatataccttttcttctgatacagaaagtgctattctatctgctattcttggtcttgctccaccttttccgccaacatagaacatccatccttttccgcttcctattaatcctatatccttaaatgcactatctgcacaactatgagggcaaccacttactcccatttttaatttattaggtaattcttttccatgatataagctgtccaattttgaaccaactgccactgaattttgaagacctcttttacaaaaagtagttcctggacatacttttatacttcttacacatagacctactgctgcacctgggtccatccctagatcatcccaagcgttatctaaatcttcttcttttaatccaactaatgcaattctttgagctcctgtaactttaatagctgctgcattatatttttcagctacatctgcaatatttcttaaaatctctggagttacaagcccagcggttaaatgtggagcaattgcatatgtttccttatccctttgtaatattgctcctttttctaataaatcagttttcatcgcgtatctctcctaattctaattctcaaaataaagtattaatgttatataataatttctattagttattgtatcatatttataatccaacctctagctaaaacacgatattcgaaatattctgaacatatagagaatatataatatatggtatatatttaaattaaattctattcattagatgccaatatttatgtacctcaagttcatgctttaaattatttaaactaaaatgcgattgacaaatttaattttattcaatataatttagtcatatcgaacactgtataaagattaattatatcggaggaatagattatgagaattttagcattggaattttataaaaatggaagaatgaaagaatcttttgcatttggaggatcacttgaaaaagaaaaaattaatataaacaaagattaccctgcaagcctgcaaaattatttaatagatactggaaaagaggttattctagtagacacaggtttaccagttgagactcctgattttgaagataaacctgatcaagccttatatatgggtgaaaaaattgctaattttaaagaagcactaaaaaatgtaggttatgctccagaagatattagtaaagtagttttaactcataaacatcccgatcatgccggtgaacttagaatgtttaatcatgcaaagatttatatatcaaaaatagagcttgaggctatgagtgttgcaggtgacaatttagttgaagttaattttactgatggacagtataaaaactttgataaaagccaaattataagtgaaaatatttatatgctgccagcttatggacatactactggaaattcattaattgttgtttacgataacggtattcactacatgattcatggtgatgttacttacactgacgaagctttaaggcaaaaccaattatctgttgtctttgaagataaaggacaagcaattgaaacattaaataaagtcagaacttttataaaagaaaatgatacagtttatttatcaactcatactccagaaggtgtaacttccctaaaaaataagactataatgaaattgtaataaatcgtaaaattgaaaggattgaataagatgaataatacaatagaaaatataaaaaatcatagatcaattagacaatatttagataaggatatttcagatgaaatcatagatgaaataataaaagcgtctcaagctatgcctaattcaataaatggtcagcaaacaactgtcatagctataagagataaggcaaaaaaagaaaaacttgcagaacttgttggaaatcaagaatatgtagctaaagctcctgttttcttagttttcgtaatggatttttatagaacttatttagctggcgaaaaaactggttataagcaaataatacatgaagacattgaaagtgctctagttggtgctgtagatagtggaattactttaggtgcagcaataattgcagctgaatctctaggccttggaactgttccaattggtggaataagaaaaaatccagaagaagttatagaactcttagatttgcctaaatatacattcccacttgtaggccttgcaattggatatccttcagatgaatcacaccaaaagccaagaattccatttgaaagctttagacacaatgatacttataacaaaaaagctatagaaaattctattgatagctacgatgaagaaatggaagcttacttaaaagacatcggcagatatgacaaagaaaaaaattggagtactttaacttcaagtatctatcaaaatatatattatccaaaagttaaggatgcaatgaagaaacaaggatttacccctgaaaaataaatctctataaattatatgtttttaaattagctgtttatttaacgcatatgatttataaatagcttgtggctaggataatagtttttttcatatatatttccctaataaataaagagtaccaatcatattccccttatgattggtactctctttgcatttttaatgtttttttcaatttaatgttttacgttattaaaactaataccccatatcatccatttattcaaatcttaattcttaatatttcttccttatttagttttgagtatttttttaaaaatttttaaaagaaggaatattcaaaatatttagaatatgatataataagataaaaatatatagaggtggtatgctttatggagaaatatggagatcatgaaataatcgtaatacagaataatgaaaatcaatacccatataaggcaattgcaaaaataggtgataatgagataaagcataaaggacagagtaagtctgaagcaattgatctagttaagcaaagcattaataagttaaaatctaaaaatataatttaactgtagtataagtaaattcaaacgaatgaaaactattacacttaaaatattaggtatggaaactacatataacccccgacagatgtcgggggtttttatcttagaaatagaaaaatagacttctttattacctcttcataagaactactcgctctcacaacattaaaacgtcatcaggtaaaatattattttcaaattcataagaataccttgtttattcttatatatcaactttacttacggtacgaagcctgcctttgataggtgttttttgtaactgctggaacacccactctcctttattatttaatatttctacaaaggtagatatatcaaatatattgattattcctatatcgtcttttgtcatgccttcaatattacaaagcgtgcctacaatatctaccgccctcatctttgttttcttacctgcattaatatgtaatttcataatctctttacttagcttcgcaccttttgtttctttaatttcaggtcttgtgttcattttcaaagcaaattcttctttaagattatttacagtttccactttaggtctttccttcaaaggaatttctttaccaatatattcatgtatatcatttaaaaacttactttcattttgtgttacaaaagtaattgctctacccatcttgcctgcacgtccagttcttcctatcctatgtacataactttccttgtcttctggtatatcataattaattacatgggtgatattatctatatctatccctctagctgcaacatctgtggctattaaatatctaaaataacccagcttaaaattattcattactcttaatctatcactttgttccattccaccatgtatttttctgcaatcatactggagctttgccaattctttataaacttcatctaccttttgttttgtattgcagaatatcatacaactatctggattttctaatatagttatatctcttaagagatctattttattcaattcatttacgttatatctttcttgacatatattatctgcagctttgttttgctcctctatttcaatatgtataggatctttcatatatttattacataaagtctctatgtcttttggcattgtggctgacaataacatggtcacacgttcttttgataagctttttattattgtttctatttgctctacaaatcccatattaagcatttcatcagcttcatctattataagatactttatctttgatagatcaaatgtacctttttctatatgatctataatacgaccaggtgtcccaactactatatgtgtcttttgcttaagttccttttcttgatcatagaaagatgacttcccataaattgcagctgctttaattcttttaaatctacctatattaaaaaaatcctctttgacttggatagcaagttctcttgttggtgtaatcactaatgcttgaggtttattttcttcccaatccactaattggcaaataggaatagcatatgatgcagtcttaccacttccagttttagactttactactatatccttttcttctaacgcaatcggtataacctgttcctgaacttttgttaactccttgaagtttaacatgctaattgcttttaataactcactgcttaacttataatcattaaaatttgcttttatcatttgatcatctcttttctatatttcttaccattattgttacaaacatacatttttatcccatattttctctttatcattacaatttatataacaatatgcatactaacctttttattatatcatacccatgtatttcatttgcaaccaatgaagaacttccttttccttactcttattttagctacttcttcaatacttaatccttccaattgtcaaatttgatatttttataattccccgtttaatattcgatatattgctttagctactccaaaattcacatttatatctgtaatatatttagctacttcttttatttcatcaactgcattacccattgcaaatgaattttgaaattctgtaaacatagaataatcatttaagccatctccaagcactactacctcatctttttttatattcaatttttgtgctacttttgcaagaatttttcccttctcagcatccatatgatttacttcaatgttagttccaaaacttgctgatacagctagtccttctaatgcttccatctttttacgaagcttatttataatttcttctgattgcgcaaaagatacaaactttgctatattattgtgtctatttaaaaactcattcatatcagtaatatattgcatatttttaaaatgcggattattattagcatattttaatatctcttcttcatcttttaattctggatggaatgtaagagatctttttaccattccagctaaagtttcttcttttgtatttgttgtataaaatccatcatctgtgtatatttctatagccagatctgtacatttcattacctctaaaatttctattgctcgttttttttcgatataagtatgttcaactatatctccattaatatctctatattctgctccatttaatacaacacaatcacattgtaagtcatatttatgtataaatggctccacatcacaatacgctcttcctgtagcaattgcaaacttaattccatttttttgtgcagccttaattgcttctatattttcttttggtatatcgtgatttttcccaatcaatgttccatccatatctgctgctattaacttaatcatttatcctcttcttccttttctataatttttatctcatggcttttagtttttctcttgttttgcttcaactctaaaatttttatctgagtaaaaaactataagtacaaaaattgcacatgtaatccaaataattggttctgatatacatactcctaaataacccattgatggagctaaaaatcctacaactgcaaatttcccaaaaagttcaattgaactagaaactagtggcgtaaatttctttccgattccctgaagcgtacttctatatataagaagtgtggctaatacataataaaaaggagtattaattcttaaatattttactgctgtatctataattaaagtatcatttgatccagttaaaaattttattatatatgttccaaaggcaaaggcagttataacaactattgttgaccatattgcacccatgataactgtttttttaagtccaatatttatccggtcatatttctttgccccataattttgacttacaaacgtggctgatgctgttgccaatgttccaagtggcatcatgtaaatttcactaacttttcttgccgccatatgtgcagttattatttccttaccaaaactgtttattgcaccttgaagtgcaactgaaccaattgaaacaagtgatagcataaatcccatagacaatcccgaagtaattaattccattaccatagtaccatcatatttaaaatctcctttggataattttagctccggacatttttttataatatgattaaatcctaggattacagctacaatctgtgatatgacagttgcataagcagaacctctaacaccccatttaaatactaaaataaatgtaaaaaccaacactacatttaaaattgaagcataaattaaatatataagtggactacggctatcgcccaatgctcttagaacccctgctatcatattgtacattatagtaacaatcataaacattaaaataattacaatatatccatatgcatcgtttattatttcttctggggtatttaaaaatttaagaagatacattattgtacctactccaacagccgtaaatactattgatattataaggtcaagaattactgtcatcgccacagcctgtctcatgttatccatctcttttgctccaaaatatcttgcaatcacaatagcaaatccattatttataccaaccgccatgccaacaataagtccaaacagtggggttgtagcccctatagctgctaaggcattttctcctagggtatgtccaacaatcactgtgtccgccaaattgtacatttgttgaaacacactcccaagaaatataggtaatgcaaaataaaaaatttgtttaccaggatttcctgttgttaaatccgtgattttatttttttccattgtagttttttcctctccatcttgctttatatgtaatttaaacattccatcaaaatcttttttaattttactatatcacaatataataaaaacttatattatccgagaatttaggaacaaaaaatactttttaggtatttattttttttagaaacatattgttttttctatatcgtccttagcaaaaaagcactgcacgaaatatataaattagtgcaatgcttttatatggaaaacattgtttccccaataggttcttctgaagtccgaagggctgaggttgctacagataatttattaattgtcttataagaatcgaagtgcttttttattatttcaaataaaagtttttgccatgcttttatttttcaagatttttatttaaaactttgtcaaacccactttaaataaaaaatgcatatcatttttcatttaaaatttgattggaattttccttaatatgaacccaaaaatttcgaaaagggaattgatctgaaaaatatgattcaacttgattcttataactgccatttaatactttttcggtattaaaactaggccattgccctaagtaacgtctttcttctttggaaaaggttttagtaggcatagccaaatgcaatataagcatagcaagaataaataaaaacggaaacataggtacaatattctgcatacgaataaaaattttattattatttatttgcatattaatcctccaagttaaaatctaaaatatataaatgggttataggttgaaccgaccataattaattgtatttccatccacagtaacaagtcttgctccaatattcatgacaataccgccagatgatatcaacatctcatccatagtgcctgagtatttttcaagaaatcgcttcactttcaccattagaattcgaggactatacggctttattaaataatcatctgctcccagttcatatcccataagagaatcatcctcatctgagcgtgcagtcaacataattataggaatactagaatttttccgtattctacggcatactgaccaaccgtcaatcttcggtagaacaatgtctaatataactaattcaacagaatttgattgaaacagctctaaagctttttctccatctgcagcctctaatacctgatatccatcttcaattaaataatccactataacttcacgtaaaatatcttcatcttcaacaaccaatattttattcattccgtccctccatttgtttacttataaacttaattaaagttaatgattgtaatgtataattaactttaataaaaatatcaaattttgatacttcatttcaagtttatcttacaaataaaatcttttatatttacatatctaattttattataactacaaaactaatcaatgcaaaataaatgtataaaaataaataattttgactttataatcacacttgctttatatcaatatagtatacataagtccatacatccttttatgtgtttgtagccttcataggcataaaaaaagtggcttcgccacgctccttcggagaaacatactaaaatataaatcaaaaccatagagatttgtttttctctatggttttagcaacaaaaactgttccagtttttgtaaggtatctgaaacctttgccaaggaagtatgacgagtttgctaatttcataaatatttctaagtattatttctaatgcactttattaattggcaattctataattgtttcaaaattgggttaatgtaaaagcagtagctttatttttaaatctaatctaagtaattatactattaagaattatttattcataaatgtaattaaagctaatatcttctaaatataagaaaatattagcttataaaatatacgttattattttatttttcatatttaatactttcataaataattgaaagatatagtcctgtagcaatttcagataatatctttatcccctttatagcattagtttttcctgctctacaatctagctaataatttttaattacattctataaaggctccattcatttgtgcttaaatttaaccttaggtcgcaaagcattttcatattatcctttataatttcacatgtaaaagtatagatataatctccacttattttttccttatcccttttaactagcctttcgacattaattacttctacactgtcatcattatctgtaataaagaaacatatcggttttacaatgcctgctccatcagtcctagtaaccacctgaaccgatttatctactatattcataagcgctcactcctatttccatttttattataatttgcacttaattgcacatgtgttgcctatcctgaggatagttttctttcttgctattttttataaaaaattctgccaacatttcttttactgtaaaagtttaaaagatataacattcagagtatcatataatgagataaaaatatagagtggtatgctttattgaaaatgtggaaatcgaatatcactctttgtcatattccttctctagactcttatagtctccctaagtaaggctctgattattcctcctgaaaaaaggctatgttaattgttgttgcatgaattccaagtggtgcaagttccattgccaaagtttgagttattccttcgaccgcaaattttgttgagccatataatccccatcctttataaccacttaagcctccaccagactataagttaattatatgtcctgaattcgcttttctcatataaggtggaactgctctaattacatttaaaagtctaaatacattcacatttcaaaagttaaaaataaacatctgaaaattctattcttatacgttcatccttatttttaatatttctattatatatcgtattttcattagctactgctccagctggaagagtgacagtaaatttgctcccttttccgtattcactttcaacatttatactgcctccatgtaatagagcaatagatttaactagactcaatccaataccagtaccttccgcatttctagataaagatttatccgcttgttcaaatctatcaaatataatatccattttcttctcttcaataccaatcccattatcctttactgatatttcaacccattcattcatatccttaacctttacaaatatttcaccattatcatttgaaaattttgtggcattcgaaataaggtttagcattattctctcgattttttctggatcacacgcaataatcttttcttctgtattcgtgtcaaaaataatatttaatcctttaattttaacaaaacttgttactgacataactatttcttctacgacattaactatattcacatttaataggttaagttcaaaaaatcctgcttcaatttttgacgtgtccactatattgttaataagctttgataatctataggtatttagctttattgatttaaaatatttaataagtatatcctttttatttattattgaatcatccatataatacatttctaataactgagccgttgccgaaattacatttaatggagttttaagttcgtgagatatattaaccaataactcttcctgcgattttaatgttttttccatgattttattcgtctttatttcagcagtaacatccatttctaataatttattttgttcttctagcattttttctaatttttttctttctgtgatatccctactgaatcctgatacagatactaaatccccattttcattatatgtaggaactaaataatcctctatccagacataatgtccatctttatgcttaaatcttagacaaaaatctttggaaaaatccgtgtttttatccactctagattgcataatattagtatcctcaggatgaacgatttcgaatacaaaatgagggtcaatatagtacatttctagttcatatcctaaagtctcttgcatcgatgggttaacatatataaacttaaattccggtaaaatttcaaatacaaaaaaaacgtccttagttttttcacatgttttaattagttgattgtatctctcttcaatgtgaatatatttgcttatatcaataagagacaaatatgtcccaactattttagaatcatcattaaaaacaggtttagagacaacctcaaaaagtaactggttgtcatctttttttaaaactaaggcctcgaaactttcacgtgataataactcatcaaatctataacctaaaaatttatcaatattagtatttaggatttcattttgcataaatcctaaaatcctatagcaatttttagaaataaatttaataactccctcagtatctactttaataagtaactctctacttatttcaaaattatctgaatcaacatttaagttcatttttctattctcctgacaatatatgtatactaaattcaaaagcaattattaaacattgaagagtctcaatttggatttccttcatatatttacataatttctcactaaaaataattataacatataatcacaaagacatcttaattttttgtttttactttgattacagatgaaaatttttacacaaatacatttagtagttataagtatataatttatgaacatcagtgttgtagtcgagagtttacgaatgacttgctaataacttaatctccaaataaaaaaagagccttgttacaggctcaatattaatatttattgtattacttatttgagttttcttcatagatatatagcctaaactttaaacttagacatttcagcctttaacttttctgcactttcttttgtttgtgtaacctgttctaatacttcattggatttatgactaatttctgaaactttatttgctatatctaccgttccacttgctccttcgcttgttgcttctgctaccccatctatggtttttaaaatatcattaattgatgctaaaagttcctctgatgttgaactaaagtccataacaaggtcatctacaaattttgcatcttcactatattttcctgctacttcaagcatattactatagtctctctttacatcttttgatacaaactctaaaagattatttgaattatatgaaagatcgttaactgcttctctaaccttatttgttactttctgtatttctgatacagtatcttttgactgttctgcaagttttcttacctcttctgcaactacagaaaatccacgccctgcttctccagctcttgctgcttctatagctgcatttaatgccaataggtttgtttgttctgttatctgcataattgaatcagatagtacattaatttcttcaactacttttgacttttctaaagctctttcaagtccatcttttgtatttacaaatgtgttatgagccatcttttgagaattttcaatatcttctttagtttgttgtgctcttttatttatttctcctgcttgaatcgctccatcttgtgatttttcagctattgattgtactgccttacctatttcttgagaagttgctgaagtttcttctgctgaagctgaagtttcctcaatagttgctgaaagttcctgcgtagttgctgaaacatcctctatattcccattaagaattttgacttcatcatttactatgttaacaacctcttctattctatctgattcttctacaatatttttaattaatgattttaagcttacatgtatattatctaaggcttttgccattgttcctatttcatcttttctctttttaaattctacaggtacttcacttgtgaaatctccacttgatagtatgtccaaatagttaactgaaatatctaaaggtttaactatatttcttgtgataatcttagacatcaaatatcctactataatagaaacagctatagatataagaaagattaatgttatctttttataattctcattgtttaactcattaatctcatcggcttcttttacagtatgcacggctaactcttttaaatttgcttgaaaattgttggccacatctttaatatcttcattcttttctaatgcttccttttgctttccctctaaagcaagttttaatatctcatccattgcttgtctatatgttgataaatcattttctatcattggaatcatatctttttcatgcgtatctaaatctacctttttatagttttgaaagttatcatcaaacatttgcgttctttgtttaatgtccttcattttttcattttgtttgtctttatcatctggatataatattatgtaatacatatctgcttcaattgcccttgcctgatttctattatcatttaaccagttaattgaatttaatttattattatacattgattccatattatcattgcttatttttagttgaatgtaaccgaaaacaccaacaaatactgtaaaaatcaatagtattgaacttaataattgtaatttactttttattttgatattacttaatttcaaaataaaatcacctccaaattcattttcgctatttttttataccattactctctgcaaaaatattgttgcactgttttattgccaaattcgacataagaatgtatattgctatattatcattatatatttaatatatttctttattaaatatatcccataataaataagcatcatattgtttaaaaactactttaaatcaaatcaccccgaatctatcctattccataatacaaataaaaaataagcttatcaaaatctgacaataatctcgcactttaaacctattttcccataatattcttttgtttataattataacacattttttctaattttatattagaatttaatataaatcaaaaaaagcttaaagtttattattttttactttaaacttttgatttattatattattttaatgtttaaaatccattcttttaacaaagactataaaatataattattgcaaaaggaggaatttttcatggctaaagttactggcgtagttaaatggtttgatacagaaagaggctatggatttatatcttgtgacaaaggagatgatgtttttgtacatcattcccaaattaaagataaaggtcctgataaagatctgcatgaagatgaaagtgttaccttcgacattgaaagtggcgaaaagggacccatggctacaaatgttcaaaaattataataaaattataatataagattatatatatggattaaatgaattgtatcatctacttttgaaaaccctattttcttagagaggtgattcttaagtccaaatagctaaatttattaatatgaaacatctaatttaattgcaaaaaaagaacccttgttttagggttctttcagctttaaagcgtattggccttctctatatattctcttaaaattccacatgtatgattaaattgtaatttttctttttccgttaagtttatttcaacaatttcttctactccatttttgcctaatataacaggtacacttgcaaaaacattttcttcaccatattgtccttctaataatgtagatgcaggaagtattctcttttcatcatgaagtattgctttaactatttcacttaaacctacgcctattccaaactctgtacatccttttccagctattatctcatatgctgcatttgctgttctactagctaactcatctaaattaagctttccataagtttctggtttttccttcatcaaatcaaataatggttttccaccaaaatacacatgtgaccatggtaccatttgtgaatccccatgttctcccatgcaatatgcttgtatagatttttgatctatgcctgcttcatctgataatattcttctaagccttgatgaatctaacgttgttccagttccaaacactttgtttttcggaaaacctgttttttcccatatataatgagctattacgtctactggatttgatataactataaatataccattaaatcctgattctagtattggatctattatagtatttacttcgtttattgtatcttctaagtaatctaaacgtgatttattatcctctggtggaactccaaggcttactactacaatatctgcatcttcgcaatctttaaaagttccttttttactttttacataatgaggtaaatatgaaattgtatcacttaaatcaactgcttctgcatttgctttcttttctattttatcaatcatcacaatttcatcacatataccctgtattgctagagaaaatgcacaatgcgaaccaacatttccacttccaactattactattttccgggtttttatactcattttcaatcaccatctacttccattaataattagggacatgaaatagaataacaagtccaatttttttgattgtgccttagtaaattagtccctactattcaacaataccacctgttgctttttcagcattagcttctatatctgaaggaatctttatatttaatttctttgcaacatctgtatttataactacttttatttcacttaattttgttatttcaatttctgaaggcttctttccctcaaatatttctgcagcttcaaagcctgcttcttttcctaattcatagtaatctatacctaatgttgcaagagcgcctttactaattgcagcgtcttcagcaccaattacaggaatatttttttctaaacaaagcttacctactaatgtatagcttgaagctactgtattatctgttggtgtgtatagtgcatcaatttcaccaagagcacttgctaagttttgatttatttcatttgtattagtgactgctatttcctttactgtaattccatgtttttctgcttcagccttaaattcattaacttgaattacagcattagtttctgatgaattataaattacccctacagttttggcatttggaattaactttgttaataattccatttgtttatctactggagtcttatttgatgtacctgtaacattagtacctgaactcttccaatcctttgcaactcctgcttttactggatctactaccgcagaacatactattggtatatctttagtagcattgtacgccgcttgaactgctggtgttgcaattgcaaagattaaatccttcttactatctgtaaattgtttagatatggtttgtgcatttgattgatcaccttgagcattttgctgctcaatttttatgttttttccttcttcatatcctttttctttcagtccatcaataaaacctttattagttaaatctaatgcgtcatgttgtactaattgtataattccaatatttttcacttctgatgaagtagttttctctgtactagaacctgttgtatcttgtccacatcccgaaagcactccacctactaaaactgtacataataacattgccaattttctttttcctaccatattactgtcctcctaatttttcactttcataattaacacattcctactgtactactaactttaatatcattatgataatttatttcatattttcataatgatttgataacattttaccaatctttttgttataatatcataatttataattgttgtaaagttaaggaggcgtttggctaatagagtaaatctttctcacaaattaatacagctaaaagtgtccatcctggaatatatgctatccatataatattagtaagccatgtagtctgctgcatcacaaaaggaggataaaatactgaaaatgctacgccaacatcacagataaacattaaagaactagaaacagctattatacatgaagcctttttagtaaaataatttctaaaaatagtacagacagatgtccaagccatataagataaaacagcaccaaatattaagatccctgctttcattactaaattattaatgtatggcatcaaaatgcaaaacactgcaataaaaatagttacaaaaagtattgcaattaatatttctgcctttcttaatttaaaatttttttgataaactacaattaaacaaagataagcacacagaaatcccaaaactccaaatagagataagtctatatttatttgcatcgtatatgcaaatactaaaaagaaatcagcaataacaaggaaaaagaaggataaagccattagtttttgctctaaaaatttcttttttattgttatggctgataaaaaaagagtaatcatgataacatatttaagatataaaaccatattttctttaggataaatattatcaaaaattaagatcaaaatagttattggaaaataaattgccattaaaattctttgtgtattattcatttaaattccttcctttatttatatttcattgtttttagtaactaacaatttattcataattcaataatcttcaagatttaattcctttaagtgagagtccaaattttatatttggctcctcgaacttactcagcaaacgcatgcgagtcgagtttcctttattaccttgccttattttttatcttttattctgattattaaaaatattatagctaattaaccataatgttctaaaattcctgaccttgtaaaatgatgattgtctttaatacatattttacttttctaattcattctttttagaatttaactattattttatgctatagtgcaaataataaagctgagattttctaaatataagaaaatctcagcctgtaaatatgttctctataactctgtgtacttcttgctgttacctttagctttttctactggatatttctcttcgtttttatccattttactatttataatttcctctaaatctactcctaatgaatcagccatatgtatacaataaaccataacatcagccagctcttctaaaacatgttctttattatagttttcttcatcccataaaaattcttctagaagctctcctgcttctatggatatagctttagatagatttgctggggtgtgaaattgactccaatctctgtcatttcgaaattttcttattctatttattgtttctttcatattattcactctttctatgcttttccattttttatgtttattatagcatatattacataaaatgaatttcgtgaagatctctaagtattataaagctacactttttaaaaataattcttaatcccatgaaatacccttgaggtgttaaaaatggagaaaaaaataaatgttatagctggaattttaaataatgaaagcaaagaaatattatgtgctttacggctctcctgttatgaaatcaccaaatctatggggttcacaagtggtaaattcccgaatagcggaactaaaaaaaatctactgagattcaattattcccttgccttttttgttaatttgtagtatatttgcaacatgatgtttaaaaaataattttttaaggaggttgaactatgaatacaattatattatttattacatttataaaattaaatacatgtacttattcatctgtgaaacctcgcgaaagaaccgctatgtgatatctatgattaacttttagcgtttaacttttatattattttgcgttgaacacagctctgaatagctgtgtctttttttgcgtttaaaggtttataaagttgctttgtttaacttagggcatattcaaaacttgttatttatcttcatgcgcctaattgaaaactttataaatttaaaattttaaacatcatacaatatctaggcatatcaaactatcagattattgaaatcatatgccaaaaaggaggaaattttatgaccttatttaaaaattacattgcaaagcaatggaaattattacttttgcctatatttgctatgatagtttccatctgtgcagatagctcttatccttactttcaaaagatatttattgataatataattcttggtcatatggataattatttaattatatttttaatagttgttgcttcagttgcgctaactcatggtttattttcttacttaaatgagtatttgtttgataaattcgctcttatagtgtgtaaaaaattgagacaagatttatactctaaatttcaatcttttgaattctctttttttgataataataacactggtgaattactttcgagaattattgaagatgtagatgtagtatgggacacgctatcctttggactgagattgctattggaagcaataatacttttttcagtttctgcttttataatgtttaatataaataaaactttaactattatctgcttacttgttttattacctgttgcttatattggaacaattatggacaagaagttctggactgtatattcacaaattagtgaccaaacagccgaaataaactctatagttcagcaagatgtttctggtataagacttgtaaaagcttttgctcgtgaaaaatatgaaatatcaaaatttttgaaagtaaacaaaaaattctttgatttaaatgttgagcaagcaaaaatagttgggacttatggtcctataattgaacttttaacaaacgctgcaccaattttaatgattgtttatggtggttatttatgtattcaaggaaatttaagttttggtagtttagtagcatttactagttatatttttaatctttcttggtgtgtaaagaatttaggtttttttattaacttactttcacaaaataaggcttctatgagtaaaattactgatattttagatagaaattctgaaattacttcaaaggaaaatggttataaccctactgaagttaaaggagatattatatttaagaatgtaagcttttcttataacaatgttgaagtacttcatgatatagatttaaatattcctcatggaagtactgttgcaataatgggtaccactggatgtggtaaaagtaccttactttctctaataggcaggtattacgatgtgactaaaggagaaattttagttgataatgttaatgttaagaactggaacttagaaactttaagagctaatatgtctgttgtatttcaagatactttcttgttttcagatacaataaaaaacaatatagactttggaagtgataaatctgaaagtgctctaattaaagccgttaaagatagtgctgcttactcctttattaaagaaatgccagaaggttttgataccattattggcgaaagaggccttggcctatcaggaggccaaaaacaaagacttgctatatcaagagcaatattaagaaaatcacctatcttgattttagatgattcaacttctgctctcgatatggaaactgaatttaaagttcttcaaaatctaaaaaatgataagaaaaaagcaactacctttataattgctcataggatatctggtgtaaaagacgctgatatcattctatttatgaaagatggtagaattgttgaaaaaggtaatcattcaagtttagtaaaggctaaaggttactatcatagtgtatattctcaccaatttcaggattttgaagcacttacattggaggcgaattaatatgaatgatattttacatgaatcatcaaagattcaaatagtaaaaagactattaacctatgttaaaccttataaactgaaagttactcttgtaattttacttttacttattgtaatggcttgtaattcagttaccccttatttaatgaaaatatctatagatacttttgttgcagataaaaatgttaaggctttatttcttcttggatgtggattaatacttatgaatgtattttcaatgattttatctggaatcagaactatcgccatgtctaagattaccaatcaaatcttagtggatattagacatagcttatatactcatatacaaactttaagctttaacttttttgataatagacccgttggaaagattatttcaagagttgttggagatgtaaatgctcttcaaaatttattgaataatagtattgtaaatttaattcctaatgtttttactattatccttgtaatttgtctaatgcttatattaaatccaatgcttgcaggtatctgcttaattacaatgcctttattattatttgcaatgttctacattcagattaaggcagataataaatggaaagtctttagagaacatcgttcttctttaattggatacactcatgaatccttatcaggaatgaaggtaattcaaggttttagcagaaaatattacgctaaagataaatttgacagccatattggaaatcatgcaaaaggttttatgactgctgtatttactcaagatttcttttggccatttttgacttccttccgtggtttaagtatggtaattctactcggctctggatatctgttaagtaaacaaggaaatttaagcttaggtactttaatggcattttttatgtacattgaaatgctttggagacctataataaatctctcatcattttataatgcctttgttaccagtatgtctgctggcgaaagaatttttgatattttagataccaaaagcgatattgtagatgaagcatcaattaaggatctccctcaaattaaaggagatatcgaatttgatcatgttactttttcttatactaatgctgatattccagcccttaagaatacttcatttaaattaaaagctggcgaaaaaatagctttagttggtgaaactggtgcaggaaaaacaaccataactaatttaattagcagattttatgaccctacctttggctctgtaaaaattgatggtgtagatataaaagacgtcactgttgaaagtttaagaagccaaatggggataatgcttcaagattcatttttattttcaacctcaattaaagaaaatatacgctatggtaaattaaacgctacagatgaagaggtaatacaagctgcaaaggccgttaatgctcatgagtttatcgaaagactagaaaagggatatgatactgatgtaaatgaaagaggttcaagactctcccttggtcagagacaattaatagcttttgcaagagctttaattgcagatccaagaatactaatactagatgaagcaactgcaaatatagatactgaaactgaattattagttcaagaaggtataaaaaagcttatggaaggaaggacttcaatagtaatagctcatagactttctacaataagagattgtgataaaatttttgtactttctaaaggcagaatagttgagtcaggcactcatgatgaacttcttaaaaatcatggctattattataaactgtattcagctcaatacagcttcctaaagcaggatgcttaaaaaattcaagctatttaaagagtaactaaaaaagataacaaaataaataacttagctaactcatttaggagttagctaagttaaaaacatattaaattaagctcttttttcaattcctcctgatatatctatcatataatactttttaggtacacatacgcctgttgtattaaacctttttgtcatagcttcacccttcatctttaaatagtatgctatgctgctctgcaaaaattactaataactattcactatctaaacaaacactacaaatatttcctttccttcatagtgtattatttcttttttatactctttatctttattaaaattgtaaacaacaagatatcccttatctaacccttgaatatcaagatagtctttaagctgatttaatccttttttatggtattcagcacctctccatattttaagttcaattacgtacttacttgaaagatagctaactactatatcaagtctcttttcttcagaaatctgtacttctttgaaatcaaaccctacaccatttattattggttttataaatgctaaaaatagtaatctaccctcacgttctataaattttgagtcaatggaactgtattgttctttaataaactgctgaaatcttaaaagtatcctttcaaaatctaatccattttcaattatgaaattttctttaaaattataagttgacatatctgttttattttcaagcttggaagagaaataattataaagcatttgctcaaatattctgttagacatttttactgttccatcgatattttttaaatatccatatataactcctaaattaataagtggattatgaatattaaaagtcttttccgtaccattaattattaaatcaaatatataatctttaaattcattattattttcaatattttttactaaatcatcaaaaagtgtattattttcttgtagcaattcctttactgatctattaatattttcttcattccataataattgattttcatcaattatctgacaaagtctgcttactaagaaagggtaaccacttgtataaaaataaattatttctgaaatttctttaatactaattgtcacatttttatcttctgaatattcttttaacatggtgcttatctcatctgaattaaaactcatatctacattgaaatttactgctatattccaaggactattatattttttttcgtcatcttgtctgattttaagcttcaaattcttaatatcatacaccccagcaagaattactgaataaaaggttttatctttaccctgttgccttaataaaaatttatttctaagcattcctaaaaaactcataaacaactgattattagagctcttatcaacttcatcaataaacagtacaatctctttgtcaacaagtctacagaaatttgtaatagcttttgacacagcatttaaatcattaatattttcagacatttcataaagtttagatgaatattcttggtaattaaactggatactatctccgaagatttttaatattgttttagaaaaagttttttcttcctcaaatattaaatctcctaaaccttcaaaactaatacttaaaactaaatattcgtctttcaattcttgttctagcatatacattgtagtagtttttccatattgccttggtctatttataacaaaataatctcctctataaaccatattttttatttgagttagcttatttgttatatcaaccatataatgcaaatgaggaatgcaaacacctgttgtattaaatcttctgttcaaaatcaacacctcttttccgtagttgtattctatcttttacattgatacccgaaccacttatatagtaattattataccatatattaagaaactaaaatttttttcattctaatcttcttaacttttttcattgttaaattgtaaaaagtttttattcaaacccatattcctttaaaagaatatttaattgatctatattactgattcctatactatcaacttttatctcatctatgtttttaacaaaagcactgtgggtacttccactgaaatatcatttttaactgcctttactcttttatgcatttccaataatctataagagtatctaatgtaaatttagcgttggcgggactagttgaaggtaactttataatatctctttttattattggatatgtatatttcatgtaaagtttgaaagccttgtcaccatttgcatatatcttttcaatgctagcattattcaatacaatagatagatctgctggtactacattcttaatactactgtcacttgatcctgtgatttcgcagctttctattacgtcccaaagcgcaattccattatttaaaagcatatctttcttgtcaaaagttgtattagcttcattacaatcaaaaattcctgctattactttccaaaatctatttctggcattggcataataaaattgagcttctcttgattgaactgatggaaatgtaccaagtattaatatccttgatttttcatcataaataggttcaagcatctgctttacttgtgacatactattccttcctttcccacttaaaagagttactatttatctttttccctttatatctgcgaatttaagtatcctataagtctttttattaaattctcccttattttaaaagctttttctctatataactttttaactccatttaggatcatacaagtttttgcctcttaacagaattctgtaattatctgatattgtacttatgtaaaattatatcatattggtacatatgaaaaagcagtaaatcaagtttttactaatttaccgcctaaaatcatatgctattatagtatacattattatactttaaattttaatttttaatatttcttctttactgagttttgaatattttataatcgtcacctttacttattaggtctaaatcaatgtttccttgataatattgaaaccttttagtttaaagttttattcatcttattacctttaccttttttatcttttgtttaaattttaaaaggaattgcttaaaattagcaattccttccaatataaatttagttaatgagcatcatttagtatttaatataattttacttggggatatcccatacttgattaaatattgttttgttttttcactattaacataaaacacagcctcatcacactcgtcaaatgcatcacgtcctatactttccacactatctggaattattatcctctttaaactaacacacctttcaaatgcactatctccaatactagttacactatctggaattgttacatctgttaaaaactcacaattataaaatcctctatttcctatactttttatctcaatatctcctatttttcctggtataactagtggaataccagtttttcccggaccccaagggacatttctattaaattttacaattccgctagttgacttaagaatatcaaactctccagctttaatacattctatcccaattccattatcatctaaataccagccatctacatcttgattcttttccatatatccaaaagtaccgaaataataccagtttccagaaatatatctccaacctttagcccatgaatcgccttctgaataccaccagccattagaattttgttgccattctgcacttgcacctattggatttaataataatactgaagctactattaatacactagctattacttttgtcaattttaactttttcatattctcccccactttttaccacttcattttaaattaatgctttattatattttaacataattaccaataatattcatcagtatcacaaaacagtcactttatctattttttatatcttccttccggcttctaatattttcactgaatcctctgctaattccttatcaatagtacttccaagctttaaatcttatcttcttaaaagcgccttaatacatttaactggtctttttaaaaattcctctttatttaccatcctaatttttgcccttttactgtaaaatgactatcatcatttttaaattctatattaaaattattattcttatctacagttatctttgttaaagtggcttggcccataacttctgtatttacttcttcatctttaaaataatacattaaagcctttagtgttattccatgagctactacaaaaatagtttttcctctattttgctctatcaacttatccatagtttcacttattctagttctaacacatcctaatgtttcaccatttggagcacataaattaacatcaccattcataattaaatcaatattccattctggattttctttcataacttcatctgttcttctaccttcataatcaccaaagcacatttccattaatccatcatttgttataacttctattttcttttcccctttaattatgttagcagtaactaatgctctttctattggacttgaatatataacatcaatatctatatctttaatcctgtcccgaagctccatagctctagcaattccagcctgtgttaaaggcgagtttcctctcccctgtaatcttctttcaatattccattctgtttgtccatgccttgttagatatactacagtattcattagttgttttctcctcatataattaattatatagttatcatttaaataattcttttagagatattttttcattttcattctctatataagttttatctaaatctatatctagctttcttaattgtaatctctcatatttaagtgattatcttactctattgatatttctttaaatttgcccatattatacctcgtttaatttaaattatatggcttttgtgatactattttggagcttctttttaaactataattaactttaaatttttcatttgaatgtggttaataagatccacttcaatatattcagggattttatgcctactttcgatccaatttcttaattcattttaataattcaattgtcaaaaaattatttcctgctctaattttttattcagtttaattattgtagatagaacgtctgtgtagtctttatattcttcactttctaacaatctattaatctcatttacatcattagctgtaagttccttagcgtaattaatattttcacgtaaggtttcactatccatgtttagagttttaaatggtatttttgtctttcttcttaaatgaactaaaattttaaatccccctgcatcaatatcaccagaatgataataatatatatgaggattttcagaataaattttaattaataaattttgtctaacactattatgatacccccctaaataaattacgcctccatctccagtataattattaaatgatgttaaattttcaattgttactagcttactgcctgaaactttaatttctttaatattttctatatcctttgagcttacagctatacctccaagaaaatcatttgcatttattttactttctttaagttttaagcttatatctcctttaaaataaacataggtgtaattcttcaaaatgttataatcattaagaaattcatcattagaaaattcttttataatcttaattactttactctctaaagcttcataccttttggaatccccataaactttaactgaaaaatttcttctaaaaatttctttatgctgttttagtacttcatctatacctttcaatatatctttacattctgatgaattttcaatatctaaatatttctttacagatccattactcttaagtttatctgtaatatatgttgcaaagttcccaagagcatcttcccgttctttataactttccaataatatggaaagttcatcttctttttgctttttttctttcctattgagatataaatatgctgcttctatattctcaaggtttaattgaatcttttctataatatggcttttgtatccttttcctttatatacttttataaatttttcaatttctagctgattacaagctacatcaatttcttctttatatttgtaatttagttcatcaaaatattcctttatacttttcaagttaaatttaaaatatatctgtgtatcccttaaagcatcacccttataaatgacgctattttcataagaatcaattaaattatctaatagtaattttttataatttttcatttatcatatcctctataatactgaatttatctgcttttattgcaagaagcactgtatttacgtaaggagttataggctcaattttttgtggtggtgctcctattaataattgcagctgagaattaaatttatcataaaattccatcatagacataattcttgcatcatccattttatcaaaggcttcatcaaataatataattcctatagattctgaagatgaagatacccctttgtaaagctgcagaaatgatgctgccattgcaacataaaatggagtttgagtttctcctccactcttctccctgcatactttagaaaataatgatgtagtattatcattatatttaatctctatatcatagctcatataatttctataatcagttaatttaataagttctgcttcattactttcattatctaaagttaacttatcaaataattcatttagcagttccttatgcttattttcataagatgtactaaataaagtgaaaccttcacctatattctcattatccattatcatatcataatattctttgttttctttactttttccaattttaaactcgtattcttcatttccaaatttaacatctttaagtcccttatttaaacccttaaattcagattttgcagtattaatattttcttgaattttagataaaaaatgttccttaaattcttcttcagcattttttcttgaagttttaacttgctcttcgtattcgataactttactttttacaagattatcaagttcatctaaaaaagtattaataccatttataccaacttctgctccgaaatcataagtaatattatatgctccctgaagattctttaaatcttcttcattttttgataatatagttttatttctttccttgctcacattaaaattatttttaatgatttcaaaagatttactttcagtttctttaataaatctctcctctgcctctttagctagagagccaattttatttatattttcctctacctgccctttttttatagaaagaactcttcttttttcatcaatactgttattaattgaagataaatttccttttttattaattaactcattttctatcttcctcttacttaaatttaaacttttaatttcctcttgaacttcattaagttttatttgaagggccatatagctattatttttttccaattcaagaatatcgtccttaagtgttgaaaccttattacttatatctactattctttttaaaacatcacacttttcccttaagttttcaagcttaagcttattaattgttttaattatatttgtaactacactaatatcttcttttaaaacattaatttcagataataatatgttaagattatcttttgcctgctctagttgatatttataagcatcttcacctatgtaaggaattttgtatatctttggatttattgctcttgcaacattatttttatacatcatgcatgtagaagtaatggatgttttatgttctttcaactctgaaacatgggtacatcttattacatttcctagtatcatattaatatatcttttagcatcaaggcttttagacactaccacccctgctaaagaattttcaagaggcttatcatacttttcaagacctctggtgtttattactccaactgaatgtaacccttgtgctttacttaatctctcataaatttttaatactgagtcaaaatcttcttcctccacaataagataaaatctttgagtatttaagtacccttcaacagcatttttccaaactggatctgtaacttccaataattcacacaagattttcggaacaatttctctccctagttttcttgtttcctttataatttcctcttttaaaagtatgacttccctaggaaattgaagatttctcttttcaagttcagaaatctgtttctctatatctttcctattaccttctttttgttttgattcatattctttttcagctctatacttttccttatcctgtttagttttatcaattacattttcagtatttattgatgttgttttatattcttctatattattttcatttagtgaaatcattttattgtaaaagtcacctatagtatccgtatcaaatagaagtctgtttaactctttaatatatgatttttgttcactaagttgttttaaaaagcgattcttatcttctttttcatgtctataatctttttcagcttgttctaaagaattcttcatcgtctctaatgctttgtattcagaattcgaatacaaatcagcttgaatattattagcaatctttgttttatcagttatttcatcataaataacattattcttgttaattaaagtatcaatattaacattcaaagcagtaatttcttttgttttttgttcaatttcctcttttaatagctcttcttctgcttttaatactataaattcatgaagacttattgtccttgaaatactttcatatgaagagtacttaacttctatttcctcaagctttttaatttttatttttacttcatttaaaatgtcttcaaattctttaaaagttcgtatattttccctaagttcatcaatattaactgatttctcttctaatatgtaagtatatacaaactctttaacattagaaattggtttaaatgctaaagcctttggaagcaattcaaaaaatttttcatttagccttccaagtctgtgagaaaaatcttttttagcatcaactatccttgttgatgaaaaaggcatattcaattcttttccatacaacctaaaattagctatatcagtaggttcattattaactataaaagttacatcttcaaatctgcacttttctactctataccacagaatcttttctgaagtttcagaagctgaatcaattactgctccaattataaaataattctttttactttcctcataaaattccaaggctacgtgagctgaaacatctccatttctttcaaattcattgtcttctcttcctgttttaaatcttacatatcccgataaacttcttttggaattttcattagctgccttattaaaattatttttagaacaagttaagacaaattgaatagcatctaaaattgtagactttcctgcaccattttctcctgacaaaagagttgaatttttaatttcaattgtttcatccttaaatgcatgccaattaactagcctaatccccgttaacctcttcatcatcttttaccccctttcttttataagtttctaatttttcataaatactagttatattttcgcttcttactatcatttgaattgttggataaactatgattctcgcatcactcaaagtaatatctctatccaatgtttcgatgatattaaatttctttaaagttcttaacgcctgcctaagtaatgttttatccattaatctatctttaaatccaagagccataaacctactttgtatttcttctatttccacaatcacaacttgagataaggataattcctgcattttttcctggtataaaatccttagtattaaaagagtaatactatctataagttttaatgaaatcttattattaccaaacttattaataagctgagccgcctttatagatttattaatttcaagttcaaatcctagtggttcaaaatattcattaattgcatctttatgtccttctgcaaaataataatccttttttgtgtcttccttttgcttacaaattaaacaatagcttaatagtttattacaaacctttttaaattcatctttctctttaatggacagtgaatcatatatcaaaattacttcctccatatctcaaagtttttaaaagtaaatccattattcgaagcaataatatcttttctgttaatagaatatttagctaaaacatgattaccatataaccttatataaatgatcttaataaaatcatctacactatttatctcaatttcacttgcaagaaccatctttttatctcctaaaagttcatcaactatttcatttaccttcttaggagaatactgtttttcctgctttttcttaaattcatcaatctttctttgacgttcttcctttgatagtgtatcacttaaaatcttacctggcttaaatgatttttttccttcatttgcaatatacagagatgtttcatctatataaccataagaatataaagtgaataaatctgtaacttcctccagatagtctgatgataaacttaattcaagttctttatattcattacttatgtactctaaaattccttttacgatacctgtcatatctttagaattgttaagtaaaaacttagccctagttacagctgctcttatgtatttagcattcttactatcaatatcatgcataatatcgtctaattcattaaatgcatttattatgttatgaactatatccttaactttttctattccctcatccaaagagcccaattcttcatcttctctgtaaaactctcctgcttcacttaaaaattcactactaattaaattttcattaagcttttcaataatttgaggcctatactttgagacattttctgaagtttttaatctatgatatgctttgtcaattacttctttagtatagtttccaaaaaactcttgcataatctcctcaggtgatttctgcttagttaatctatccatatacttttttatatttgaattcaagtttttcaatccacttataattcctttagtattttcaaaaacctgcttaataacaactcctgccttttcatttgaataaagcatagaataaatacttattatatttccttgatactctaaagattctttacttactatttttaagaaagcttctaaaatgacaattgcataatcatgaaaatttataatttgtttatagtcattagtctgttctggataaatccatccataattaattagctttctaatcaaataatttgctttttccctattattgttcaactgttcatcttcttcattttcaatatcataattaattaatcctaaatattcttcaatttcatcaactaatatgtctttatcaataccataagacaaaccgttttgaaccaatttatatattaaagaaataattttaatatatagagtctttccttgactggaaagtggaacaaaaaaattctctggaactatttcaaatatattaatttccttcattatttctccttaaatctttaattttacttatatattaccatattttttattatttgtttataaagcagaaatttaataaagattgatattataatacaagaataaagctatccttatcgtggatagctttgtaactttcagttaaaatgatttacttttatcaaatgattaatcttttatataaagtctgctgaagcttccgcatcgatagtgctctacgtgtattagtgtattctatttctaatatctttgctaactcagtcaacttatatgattgcattctcttaaaatatattttagatagttttaaagtatcatatattttacatgtgaaaaattctaactattttaccttgttagaatccacttagttaagaagccttttcaaaagttactctttaaaaatcccaatttacagtttcccctataatactcatgatgttttcatcatcaaaaataattttcaaattaataaaaaagtggctgcactaaaaatatgaatttaatccaatgcttgtctatggaaaatcctgtttcccccaggggtgcttctgaagtacgaagggctgaagttgctattttctaataagaatatttttgagtgctggaatgttgaacttgatatatatgttctaattaacaatgtacattctacaatttacaatgaatgatgaaattctttcagaatttctattaattaatatagaatttttatcagaagacatataatattaaacttccttaactattttgtatttatccatattatcctgtaattcatatgcgctatcaatatatgattctatatcatttatgaagtcatcccattttacagaatttatataactactattaccataatatatttttgacccatctgaacaatcttttgtatctgtatcttttatattaaacatattattttttaatatatcaaatagagtattggtcttaagaactctacacccactatcacagcaattcttattatatgtataatattcataagaattgtttaaatctggtacaattattgctatcatcgcattagttttacttgtaacagaattaccactactattcttcctcgatacctcttttaatgaataagatatttcccaaggtatccattggtttttatcaactttataaaattctctcatattttttgatatcattacaatagtcaatgtactatcatatattctatcttttaacttttcccatatggtatcttcacttagtttagataaatcttcatcatctgactctcctttataaatattgtctgatttatcttttaaatattcttcaagtttgtcgacataatctcgtactgtattgttttcataccactcacctactatatgatttacatcattatctgcatatttatatgaaataaatattttacgtcccatgtttaaacctccttgtataatctagttgtaacatttgatagaaaactatttatctttctaacgaacattacacctcttattatttttaatattctaatttattactttgcctacgccccgatagggaatatgcatttcatatcttaaatagttttttatttaaattccttaaaggaatctaaccaagttttatatagtctagtataatactcctgaatagaagatagatgtaaacctcctgggaggtcttttagaacctatacccgtaaaaaagcgtatcatttcatcaggtagaattctatgtttagctggttgggtttcccttcgggaattacccgtgtcacaaacaaggttataagctatctgacagagtggaagttctattctatatctaaaatttaatttaaggagatatatacaatgtctaattttttttatagtcctgtaataggaattgatgtttcagctgatttttcatatactgcaatactcgcaccgaatggtgatatttataagaagtcatttaaaataaagcatgatctcaatggcttcaaccacttagttaatgaaataaaaaaagtggaagaagagtttaacatgaaaactgcaattttcatggagtccactggcgtgtaccatttatctcttttccactatcttaataaatatttcgataacacatttgttatcaatccactcgttactaagtctaacaaaaatggcgacataagaaaagtgaaaaatgataaaaaagacgctttatctattgcaacaataggaaaatttcaaaacattaagttatcacaacaacttagccttgatatttttcttctgaaaaatcttgtaagagagtattacaaacttacagatactagctctacttttaagaaaaaattatccgctgatttaagagttatttttcctggctataatactatattttcagattcaacatctaaaagttcaattgagcttttaagtcaatatccaacgccacaatcaattttagaggcacctaaggaaaatataattaagattttccttaatagctctaaaaagggcattatctggtcggaaaatacatattccaaattatttaaggttgctaatgaagctaaaataattggcttaccgttagacggtttagccgtcaaaatagccagctctataacattaataaaaactattcaatcagagattgatacattgttacagaaaattaacaattttatacagtctgaaacttttcctgaatctattagagctaatattgaactaattgattcaattcctggcatagggcaattaactgctattactataatagctgaaataggtgatattgatggttttcttaagcccaaacatcttgtagctttctttggtattgatagctcagttaatcaatcaggtaattttaaaggcgatgataataaaatttcaaaaagaggaactcgaattggtcgaagagcattatattctgttgcactagcttcaatccgtaacaatcgtaatggagttcctataaataaagtcctattagattattatcaaataaaccttaaaggcaaaaagcctaaaatcgccttagtcgctataatgcataaaattataaactacatttttgctgttctccgaaatcaaactccgtttgagcaaagagatccaaaaatacataagcaaatgttcctagaaaataactctttaaacaaagtcgcttaattttattccaatttctgtaaccgttcgtgttttgaaacggtttgtttgccatactctttttccaaaaactatttttttaaaaattaacttgactattattagctggtcttactcatctaatttccaagtaattcttttgctttttttacaaattcaataactatttacaatcacccgttcatattaacagctatatcatttaaacacccatttaatattagcttttttcaatatcttacatgtaaagcttgtacaaacaataaaaagatcaacctttttatttataagtaataacaaaattttagtataacaaaccttaaatctccatatcacaattactaaaaatttttctcttcgttatttataatttatgcataaaagattttatttttcttcttcgtcttagtatattacttaataatactttggatgtgctcttactaattcattagatatttccattaactaatcttatatttatctataaattaatatactctattattttgtatattaattttctataatctaaagcatatgtaagtaattcattcaactctacagatgcattattaagttcactccattttcctgatgctttatattcagcagccagctgcgaagaacgtccccctacagaaccaattaaaaaaactggtatattattagctttggcaattttaatttcttcatcaataccttgcaaaacgttattttcccttattatcccacccatgcatattaatgctttcacatttgatctgccaatcatgttggttctcatttctgttagactttttagtaaatcactctcaatatttttagtttcacaaaccgttgcatttattattaaatccgatagcttatatttattctcaaaaaatttagaaatatacattctcacagcttgtttataatctttaggtctaattttttgaccaatatcaaagataatattttgaaatgttggatgggcaccaaataccaatgtaaatccactttttaatatctctttagaaaacaagttcacagcatctgttaaagactgcttgtaaatttcatcacattctggaaatgcacctgatataacaatttcatcatcatatttagattgaatttcagttacatatttctcccaattataataaaaatcatcgcaattttcttcgattatttcatcatttacattctgcatttttacattatttgataacaagacaactgaatcatatagtttatagtcttcatgtttcttactgtataaaaattctgtcaacttatttaaatctaaatcattatgccttctcccaaaatattggatatactgattaatttttcgttgtggataacagtatccttttcttgataattgtaaattataaatcatttgagttttatcttcttcgataaattctaagtttttattggcacaaaaatctttaaaagtatttatttggtcatatatgtcatttgaatgagccattattagttcaaaacttatttttaaaatatcatcaacaatttttgtgagcttgctttcatcatcaaaatcctgactattatagctaaaatgtggcttatctccaggttttatagacaatgtattaatatccgcattatctatttgaatccaaattataggtatattgttcaatagtgcaaatcttatttctttttctatccattttgaatttcccgacttatttgtatgtaaaaaaatcaatacatcacttttactaagtgctgtatctattacattttgagcttcttgaccaacctccacattaacaacatctctaaagtttttaatagtttttgcttgaacatcaaatttatcacataattttgctgctatttcttcaccatctaatcttctatgactaatgaacagcaaacaattctcgctatacattgttggcaatgcaatcgaaacaatttttctagcaaacagtaatgctatcgaatttaagcaaccctcatccagttttctaagccttaattgttcccatacatcaaagctctgtgattctgaaactaactcaattggttttctctcttttcgatccatagctattaaccttattacggaattctgattttttgcttttactattaatttgttaattgcatctgaataattattatctttattattaaacattacaattaatgttaaactatcaagtgtgctaataatagaaggtatttgagtttctttttgaatatatatacagcctagaatatagttttccacctcagctttacatacttccaaaaatctttttccagcataatagtcgctcatagtaagttctggtgaaataaataatatcttcatttaattttttcctttcaaaattgaagttgagcctgtttttagccaatctttaaatgaaattttctcattgttttcaatgcaatattttccattcaattgaattaacttagggtatgaaagataaaattgaggtatgtttgattcatcagttaatcctaaaatgcagatcggtttacccaaagcatctgcatatcctagctcccaagggcaccattgagatttcaaaacattttctgaccaaatatacacaatacattgacattgacgtattctttcctttatcacttttgatgtgcttgcattacaccaagttcgtttcaaatcaaatttatcactcacccaatctacataagcaactaatccatacttattaaaatttttatatatgtcaattacatattcctcatctctagaattatgagatataaaaacatcatattttttatgtacttcaagatcatctacaaaaattctttgaagtaatatttctggactattattatttttaactatttcattatcaatatagttagttttcccctctttttttctcctcaatacaaatggaagttgtaaagcttgaatgtatttcattgcttcttgctttaacgaaaaatttcttgttcctgcattaactttatagaaaaattcaactattttttctgatttatacttagataactccctcattatttctaatttagtatgtaaatcgtaagttttaaaatatgaatcaatgaaataatctgcatattgtggatgaatttcctgtaaatatttcatgatagacactttcttatcaatttttttctttaacttgtttttagacttttcaactatatcttttgaaagttttacttgttcatacaatggtaatattttacccaattcatgtttttttctaatattaggaatagtatgaaacccgcaatctaaaataaaattataaggtttacgaaagttatatctactttttttaccttttgaaataatatattcatttttcttatgccaatattcatattgactatttaaatcaagccataaatcaggataaatttctttgaatttccttataaaatcgtcatcactgaatcctctgtgcattaagttagcaacattttgtattggtcttttaaactgttgcttatacttgatataaatactattaaactgccttgctgtttcccccataattctcctccaaaagaaactaatttgcattataaattcctaattttcattaagtttcactattttcttaacacaaattcttacatcctgttatctaaatttatcttaccttgttttttctatgatatatccactaatattttgacttttatcaaaagcattattaatatatttttgaggatcagataaaaattcttcttcatctaccaaagcaatatatgaaccagttaaaacatcaatagttttacattcttcacagaaatattgtttcggattttgattactacggttatttataataatagaatataacttacacttatctatattaattaaaaaatgaccatctttttttattgtttttgttcttagccaactatatcctccattatatttcataataaccccaactatgccgttgctgcgtgatgttttatcacttctcataatttctttcaatgaatactcaatctcccagtcaatccatttactttttttaatattgggggatattattacaatagttacagatgtaccccacatcatatcttttaaatgccttttaatattttcagttgtagtatctgttaagtctggtgaatcgctagtctcacctttataatattgtgcatcatctccaagtgcctttataatatcatctcgcaatttttgtgcttcgctatatttgtatgaaataaatgttttatgcgacattttgaaatttccttctttcacttttgaatatgttattacataaataaacatttaatttatgctactttgttagttcttaccttgaagtatgttaatagatttaataatattattaatgataaaagaatcatcttcagtatcctttcccaaagatttaattgcagcgtatagttcttcatcttgaggataataatcatccattgcatcaattactctattccataatttatttgacacatacccagtacatcctactggaataacttttaatccttttctaattgctatttcaaattccttaaaaactccgtcagagtctataatatttccatctttaatcttatttccaaagaaaaatactgcaatacctgcatctgatatcatttcttccctatatttattccacaatgctactctttcattttcatcctttatattttgaggaaatggtctaagaattagaaaatcatctgtatgtttctttatattagaataaacatgtgatagtacaccattaattacagaacttcctattcctaaaccaaacccagaaataattttaaacttttcttccgataatcttttggatagattataaacaatattttctgctctatctttactccattttccatactcatgagctgcacctgaaataaaaatattacttctctttagttttgatttaattaataataatacatcagttatttcactaaaatcatctattagcaaagcttgaattctatatctttttaaatcttttactttcaaatcttgcttagttttttcatatacataatctttttcgtcaacaaattcttctttatctaccctttttaaaaagcaataatgatctcgtgtattatttccaagtaaaatacgtattctgcttaatatatattctaagtttggatcatcaaaactaaatcctataaatagaaaagtctttgttattaaatctccttgtaatgcagtagtaaagacctgtcgcttttcattataattttcataatcatcttttgtaattaccgcatcatgtggtaaagatatatctccatgcatcttatatactacagcatctcttcttggtatatttacagctaagtttgcagaacaaatttttgtgtcaacagttttaccatagtactctaaagttttttctattaatttatcataattggttgtccaataagtttttataggtaaagaagctaaaattttatgattctcacttatttccacatctttagtaaactctgagatcagctgttcatttatactgcctcgtccacctttttcattttcataatactgagctaaagcaatcaaatcatattccttatctacatttaatcccaattcatcagctgtatctttaagaagccctttccaatttactaatccagttcctactgaaagacctgcaccagcaaaaatagctgcgttttcatctttgatatcttttaaatatctatcagcaaaatgtattagttcctttttcatattatatcatctcctattcgtataatcactttgacttccattctattagacactttgcatccaattttatagataattggatgcaaaatagcctaatatatcaatatatatgcatagcgctaataattatttttatttgcaattgcatcttctattaactgttcgatattttgacttatgtcatcatatacatattggcttgatttgtaggttgagtcaaaacaagttacatattttgatagacgttcatttttgtcaccaatgtaaatttgataaaatggattactacctttattagtttgattaccatcactatcttttaagttgtgtatatatattccgacaatacctttattaagttcataagctttctcaatttcataattaatccatttacgtccagatgtagttgatccaattaaaacaactagacaagagcgctttgccatctgatcatctatccattctttaatttttgtatctgttttttcctttacttcctcccaatcattatccgaaaaagttgaactactatcaacctttcccatattcctaacctgacctgctctccaacaatctttgttgtattcaaagctgaaaaatacttgtctctttgccatgataccactccctttaattttttagttttttatgaaaacatttcttatttttgcaaagtttaaatacactttactatttaaactaatttgtttgaatagcttataattctaattcctataaataaacaaatttcttcatacatgtaaatacataattgaattctatatttatctataaaattctttataatccaattatactacaaattttaccatatattattattttccaatttatttttctaaatatttacacatatttagaagatcacatcataataaaaggaacgctgcttcacagactgtgagttttagctactttcaaaagttatcctcaaattttactttattataatttcttcatggtaaaataaaattagtatactactgtaaatttatcaaaaaataatctatcacacttaataagtctattccgaaaattggaattataaagtgtattatttataattactaaaacttctctcttcatagtacctctcagctctatacataatagcatccctcatatgcccaacaaactcctcatccacaataacatccctcatatctttcattaataccattagtttgttttcaccattatcaaaaaattttccttcactcttaatcaaaaacttaaccggattatctttagccaattttatatacttcttcttatcccacttctcaaaatcagccgttcccttatccctaatcatatccaccttattactccctttatgataaaactcataaaagctcctataaacatcctcttcatcaatttccatcttaaccttccccccattgtaaaatgccaagaaaacagtaatcttatagctcttactcatctttgtggtttctatcattttaataaaatcatgtcctatgttattaaataaagcttcttcactttcaaataattctccattttcttttaaaaatcctaaataatcattaaaaggatttaaagaactttttgttttctttatcgctgaataaacctcatcatctatattattgtaaaattcaactctgcttggtctatgacctacaagctcttttactcttaaaaattcttctaatattttatcttttatattcatttctttagctgctaatttcttaaacacatctattattctaaaatcgaaatctactctacaatcttctggatattcttcttcattgaatatgccttttttagcttcaattctagaataagtttttccacttaataagaatggtaaaagatcagcttttttataatttcctatgaaatctaaaacatttaaatacttcttgtccttatattttctaagtcctcttcctaactgttgcaaaaatactgttggagactgggttggtcttaaaaacattaccatatctatagaaggtatatctaaaccttcattaaacatatctactgaaaatattacctttacttctcccttagttagcttatttaaagcttctgttctattttctgaatactctccattttctccactatatactgctaaagatgttattctattttcgcaaaaatattttgccatgtattccgcatgttttcttgaggtacaaaaacctaaagctctattggaattgtattttttatagtgatttaaaattagttctcctcttttattaagcattaaagcttcttctaattctttatcattatattttccattcctaaattccacttcatcataatttacagtttcatcataaatcccataatacctaaaaggtacaagatatcctttatttatagcatcactaagccttatttcataaactgtattgtaatcacaaagggaaaatacatcttttgaatcaagtctttcaggtgttgcagttaatcctagtaagaattttggtgtaaaataatctataatttttctgtaattacttgatactgcatgatgaaactcatctattactatgtaatcaaagtaatcccttgtaaaatattcttcctttaaatattcatccttccccaaggtttgtaccaatgaaaaaatcattgatttgtcattatccttagtattgttatagaagaatccaatatcatcagaatttctaacatttttaaaactaatagctgcctgtttaattatttcttccctgtgagcaacaaataaaactctttcagcttcttttgaatcaaaagctgctaaatatgtttttccaactcctgttgcagcaactactaagcctttatcaaaaccttcttctcttgaattttctaattcatataaagcttctatttgtgctccctttggttcaaaaagttctattactttattaccctcaatttcttttggttcaaattcatcattatctttttccttagctttctcaatatctttataaacctgaggccttttccaattttttgagtaagctttcattacatcatcatttataatttcagaataattaagaaacaaattttcaaattcattataaaactcattaaaatcttctggattttgtgaacgtaaaaatctataattccattcaatagaatctgttaaagctcccttagaaagatttgatgaccctatataaatttcactatcattatcattatggaaaatataagacttgggatgaaaagacttgttatgtacattataaaatcttaaatctactttatccttaagtgctcccttaagcatgtaaagagctgttggagatgtgatgtttagataacttcctgttaaaattcttatgctgacgtttctatctatggcttcttttaaatcctttaaaatcatttttactccagaatccataagaaaagaaactattatatcaatagcttttgcatttttaatgctttccttaagcttagtatataaatgattatcatatcctgtacttacatttccaagttcgcttacatttgtgtgttcaggagtaaaaactgcttctttttctattatatttaatttctcagcttcaatgtctttaagtacactcatagaattctccccattttttcaattactatcattttatactaatattttactacaataatcttttaatttctatctaatatatgacattttatccactacttaaatacctgttaatatatattccttgtaacttgtatttttataactaaaaaaggatattaattagcttcaatctcatttaaaagccaattaatatccaacattctatactatcttgattactttacagacttaagtacaattcctttcttaaatccacctcgttcttcccttttcttatccctagcctttaaaagttcttcttcactatatcctaaactattagctagtccaaacaatacttccattacatcagctaattcctcaagatttttatcttctaaaaattcattaacttcctcttgtaatttatcttctaaaagcttgtacttttcttcttcagttacaactaaagtctcacattctcttccatcaacttttattatttctggaattttatctcttactaatttattatatactttcatttgctttcactcttttcataattatttgccttaatatcaattattatcctataatccattgaaaatttaaattaaaacccagcatttctaacaacaaattcaaaagcccttttctcatttccatatttcataacacttttttcttcgcattcttcaatgataaattctctaaagtaacaataaatatcttcttcggaaaaaaatctcttataaccctcctctgtcaaatagaaattcttttctatttccttcccacttcctgctccataattaaaatcatttacggagttaactcttccaatcaaatatccgtttggttttaatactctttttatttctttgagtatatttttagttgtttcatcattaaaataatgaagagataaatctgctattatgatatatatactttcattttcaaaaggtaaagttttagaaatatccatttgaactgtttttgcttctggtatagactcctttaatatatttaaagcttcttctgaataatcacatgaaattaccttatatcctttttcacttagatataaagtatctgcgcctatccctgcgcctaaatcgattatttcttcatccttgcatttttccaaaatatttgtgtatctatttaaccataaatcataagacggtttctttactattatacttttataaatattattccaaaacttcttattatacattgacattctcctacttatgcaatcttctttcttactaataacatacaataatttttcattgcatccgaaaactttgagtactcgcttatcccttttccataccaataacctgttgtacaaattactttgtaattatatataaaccatttcaattcgttataaataggaattacacgcttttcgctgcttcatatgtcacattgaaagttcagctttttaacaaatgttttattaaatctactttcctcaaatctccatatctatatacttaaaaatgactttaaccaattctccaaatacaccccatttttcttcaggttcctcccaccaactatattgtgcaaaattcatattattaataaatgtcaatgtatatgaatatccgtctagtccatgtttctcttgtggaattatagatatttttccgtgttccaacaatttattaataatttcaccatcactatctgatatataactcttctttatctttccaaaaaagtgtctatatataataaaatactctctgtcggttttctcattttctctgtacattaaagccaaatttattcctggcttcaatgcaggtgtatactctaatagaaatgctatttcaatatcctcaatatcatattcttctaaaaaactaaatgcctccatattaattaacactgttttacctcgctttttattgttataacagtataattactttacttatatttactaaaagtcttcaaagatttactgctatatatcaatagaatagtctttatttataacaccaaagcccttcatatctttatattcgattattgcaaaaagctcattgctttaaataaaatttgaagttactaaaattataatcaacttcattactataagggacttcacatatttcttttggtaatattatagtttcttctggcatatatactttatccatttaatctcacccattttaatacaatctatctacattctaacataaaaataagactttactctacataaactatcattttaatccaattatttactcaatagtttcaagtccaatccctttcctaaatccccttcgtttctgtctctccttatctatagacttaaaaagatactctttactttaacctaaactatttacaagcctaaacaacacttccattacatcagctaattcttctaaattcttatcctctaaaaattcattaacttcttcttgcaatttagcttttaatttttgtatttttcatctccatctaaacttgaagtattacatttgcggccatccgcttttattatgtctgggattttatctcttactaatttattgtatgtcttttcattattttcatctaatttcccataaatcatttgcatttttatccctcttttatcgtccataggcaccccagatattgtttcagatccattttctaatccaataactcctgtgattgctaaacataatgcatctataacatcatctatttcacggattttaccatatattacataagataatggacttaggcgtgctcctaaatttgctttattttcttcaatagctcttgtgtggttttcagcatacacatcttgcctacatggagtattaaatatacttgaagtttttccttctgttaaaagctaaatgccaaaacaacctcctcatattttcctattaccggctccccttcagtaatcttcatcagatcatcattttctacttcatcaacaacactaatttcactaatcttctcttttttcttaggcttacttttatttttcacctttttcttctctaaggtagttactatctcattaggtaaattctctttgcttttgtatttttccatatttaatttctgagtcgcttcattatctgcttctgttacatttttattacagctgtttaaatgtacacttgtacttgtttccatacagcttttattatcagcagtagtgacatttttatttgcaatattatcttttatatcaattactttattatccttatgtttattctcactgtccgcataaatattctctatacagctgctgcatagttgtttcttatcattaatttcaacttcttctaccttatctttattttgaactttttcttttgttttaatattttgatgctttacaaagttttttactttatatattttatcttgagtaagttcaaccatttctaagtctataaaagtttttatagctaactctatttcagatacttctctattgaactctatagccaaagtctctagagtatatggtatatttctagataaaaataactctccttctaaattgaccttacctgcaagaaccacaagcctagtccaaacataatttataagatctcttttttccattctatctattattttaaactttgtatcctcatacatattcacattaaatttaacacattttctttctctcatttttgacacgctcctatataaataatttatctatataggatatatgcttaaaaatgaaagttactaatataaattaaaaattattttattcttcctataatttagcttctaaaagcttgtatttttcattttaacctctgaaatcaatttcaaaattattaattactttaattgttccactctttacaaacatcaatccattcataataatcagaatacttttctaattcttctatggttacccattcacatcttttaatgattcgaatcacttcctcttcaacaaaatcgcaaacatttctgtatttttcaccgtcttttacataaatctaatctttataaacacgtaaaagtgttaattaatctatattataagtatatttcaccataaaataagagcttatttccataagctctaaaatggtacttctttattctccatagactttccttgcgcctcgtcttcaaactcacaaaacatatattcataatcatcatatatgttaatcatcaatttttcttctcttagtttttttcttttctcaataagtttcttctgcgcctcaatgctttgcttaagtttctgcacctattcatcatctattatgatactctctttacaggaatccacaattcacaaaataaaccaggctccccttcattaagataaatttcatagtcagtgtcttctgtctgttcatagtcagactgtggtaagaattctttaaaaaatctactccacatttcactgatacaatcaccattattaccatagcatttaaaaactacataggttgccgagtcaacttcccatatacgataaccttttttaagcattgcttcttcattatctatatgagtatcttcatcaataagtactccaattccataatcaaaagttgtttcattctttttggtagggctgcatagaccatataaatcttttttaccatctggcctcatattcctaatttcttctactaaatgttctttatgacattccccccaaaagtcaggaatatcatgattaccagcctcattcataatttcattactaaatgctcgtacctttgcaataaatctttgtttgcctgtttcttcaatcctataattcatagtgtttccgccttccaatataattttaatggccaaagggttaaagagacagagttgagttccttttcttttagctaactttggtgatacaccatgaaaccgagaaaaagcctttgcaaaactttctggtgtttcataaccatacttaaaggcaacatcaataatcttactgtcagttagctgtaattcttgtcctgctagtgacaactttctgttacgaatgtactcatttgctgttattccagccattaagctgaatattctatgaaaattgtaacatgacatatgcacttcttttgctacattttcgtaattgatcttctctaggaggtgactctccatataatcaattgcgctttgtaatgactttccaaaactcatctatcctctcccctttcactatgtattataaaactccttgtaaaaatattcctgtcctagtttgcagtattttgtcctgtatgccttttaattaccactacccgcattgattaatattttaacatcgaatcccttagccttaacatatatattaagctcaaaaaattatctcctccatattatttgttcttactttatcacatgccaaaaacactttgaggtaatagattactgagatcatactagcatattcccctcaaatccgcatgtttcttataaattgttaactttttttattgctaacttcttaaattctttacttttttcctttttaaattgttaaaaaggtttctttaaacccatattcctttaaaagaaggtttaaatgaaacatttaaagcattttcctttttaaaaaggtttattgagacctttaatccaccctaactttttaatgttgtaattatttcctttagatatttatagttattacaaaaaatcccactaaaaaactcatacttagctgccagtttatcatataaaattaatcttttatttattattttcttctacccaaatatcaattaattcctttaactcagaagtttcaatattacactcttctccttggtcaaaaacatcatgtattctagtaaattcttttctaatctctaaaccatagaattccccatccctttcctcatattgattactaccagataagacattcatgataccattaataaaccatttttcatttttgcacatttgaaataggaacgcttccactaattcaatttctttaggcagactaataaccaaacatttattaccatttgctagttctataaaactaaattcatatttatatttcataatttaattcccccatatcttaatataaaataaattcttttacactataatggacttcgcatatttcttttagcaatattatctgttcttttaaagtatatatttgattcattttaattccacctaaaaaaatacaatataaatacattctaccataaaaataagagcttatattacataaactcttaacaaaacataatgatatactttataaatttcagtccaatattttcctgtattaaatattctaaaattgttatattatagtactatctaagaaatattgacagaaaaggtgtgttattatgaaattctatcaaactaaagtttttaaaattgtaatgagtcttattgctctcgcaataattttcaagtattcatttttaatttttctatctggagctggacttatagtatacttaaataaaaagaaccttaaattcagatcttttcctaaaacaggtaaaataatcttaagttctgttttaattttacttacttttcttataattggaataaaaaatgctccaactactaacaaaacaattgcttcaaactccaaagttgaaactacaacagaatcaacaagttcatctgacaagccatcggagcaacaagaagccaaaattaaagaagattctaaaccagaagttaaagatgagaatacagctgtcgattctaaacttaatgaagataaaacaaaatctgtagataattcttctgcttcagctgccccttcaacaacttcaaacagcaataactcaacaaaatcgtcagggtacacaagtacaagttcttctagtactaataatgctacttcagcaaacagcggagatgagaatacagtagtatattatgttcctggcagcaacgtataccatttaagcaagagcgatggaacactaagtagaagcaaaaatattcaagaaattaccctaaaggaagctaaagctaaaggaatgcaccaatctaaatcaaaagctgatagttagtcgtttccgatattatttaagttctacatattttaaaataaacaaaaacagtttttaaatataaaaaactaatataaacaaatagcttgctacgataaaataaaaatatcatagtaagctattttctttacaaaatgcaagctaataatctattctttgttataaataattaattaagtccttataaaatctcttaacctcataatcctgcaacccagaaacttgtccgtctccaagttccattataatccattctccattagcttttttagctatatcaaccgtaaaaaaattactttgcacttttttaagtttttccagaacttcatctacgaacttaggatattcattcagtcctttaccatcccaataaccaattgtacaaattactttataattatatataaataatcttaattcattagagattggcattctactcttttcatgaaatccaattgattctaaattaacgaattctcttaaaacaatgccttggtttaagtcttccacctggcctttaataaaattattaattacttgtactgatttttctttttcctcagcattttcaatgtagcagcttttataccattcatgtttacgagattttacataatccttaactataactggcttagagccaaaacattttagcatatctattatttcttctttattaggtacactattactccatttagttttaggtgtaactccctctaaatttttataccatttaggtaagtaatgtgcatttatatattcttctggattattaataaggtaatgatttttctctgcaaacttattataaaggcattcataccctttaggtttaagcatccaacctctataaattactctactgatcttttcacttaatgggacatttactttaccaaactctattagatcttcatagctaaataaaatcacatcaaaaccatttgctttagcttcttcatattcttcctcataatcaatatcgggtttcctcttgttaagtggatcgctgcaaaacaagaagcaaatattattaaaatcattctccatttcttcatttcctctcataaatatctttttatataccataataacttctaaaactttatctaatcaattttaattcttcaagaaccattcttcttataatctttactttacagtcccaatctccccaaaattcagtttctaaatcatctgctaaagatggttcaccttacctacaaattactatttataaacttcttttaaaactattatttttttaaacatattattcatcaatagctttcagtttctctgctgatatctaatcatgaaaaataggctaacatctagtttgattctattatttcaattatttagttatcataaataccatcaatcatagagtttcatcctcttcaatcttataatttagtaaatccacatattcacatctataaaaatcctcttcatttgcaatatttttctgtatttcatatggaatttcctcataatgactaatatctattgataaagcatgtttaaagagattttttaaagctaccgaagcactaccaatagtttctctcaaaggaatgtagactgtaatttctccattactggcaccatcttcaatttttccgctgctattatgaataagtcttattatatcttctttgttatcctttgattcaagcactaatttcaatataggttctaaaaatgtaagttctatatcttttatggcttctctaatggctatataccctgcaatcttaaaagccatttgccttgaatatgttttatgatatgaaccatcatacagtgtaacttttatatcagttaaagaataaccacaacacattcctaagcttattgactcttgaatgcctgaattaatgcattcaataaattctttaggaataacttcatcatcataaattttatttataaattcatatccttttcctcgatccttaggttcaatttcaataaaacaatgcccatagctctcgacaccactctgttttatgtatctaccttctgattttatagtattcttaatagtctgcttatatataatttgtgtatcgccagccttaaactcaatattaaattcttttcgcaaagcttcaataacaatttgaagtgtttcctcttctactccagcaataataacatacttagttttgtctttagtataaattttgaagctaggctctttctcataaattgaccttaaagctttaaagatgttaatataatttgcttttgtatttggttcaattacaataaatataactggctcttttattttattttcgctcattacaatttcctctctattcatgtaaactccatgagattactactgatctattttatcaatccctatcctgattatcatttgatttttttaatatcttagtacctaaatatgccactccgatatttattatgttacatataactactaaaaacgaaaatgcattccaaaacaatccaattctttttaatgaagcttctgataatgttttatatagatatgcagaactaattattgatataaaacaatagattattgcaaaaattgtgcttatttcaagcacccaaatatttaggtactttttaggcttaaattctaaattatgaattataactaatatagctgataatattattgataaaaatgtcattattgcttcgctgctaaattctttattgaagtttaatgaaacaacaacaaaagctattgctagcgttgaatcccctgctttagttagtacgatatttctaaacaaaaaatcccccaatattctcttaaaattttataattatgaaacttttggatttcttttatcaattactttcttatcgatatcaacagtaaagaaactactttttacacttttaagtttttcaagcacttccccaacagattgtgaattagcttaaccattcttctacttcctgatctgtcaaacactctaaaatttcaattcgaggagataacgcttgatgacatttaaatataaaataactgtcccagcttcttcgtcccttaagaggatcttctttgataataataacaggaaatcctttatactttggaatatattctggcggcatttctccaaatatcatatgtcttatagtccagttattttctttgtcatttatagcttgataattttgataagaagcatgtcctactatgtcatatgatctctttggataatatgcacctatagcagtatcataaatttcttgactaaaagtataatctttaatttcataatcagtaagccatccttttttatacagttctatttctaataaagtcataagataaaaacagttatgaacatcaaagaccttcatccaaaagccttttttagtattaggatttaatactagtactttaaaatcataacaagcgtcatggacaattggtacatataccatagattttatatacggcttcagtaattctaatttttcatatagtttcttttttcttagataataacggcttccatggcttcttgttataaccgccataactgcaatcgtcagcatttcagcgccatggtaagcctttacttcatctggataactttttaataaatcagcccaatcaacattctctatattttcaaatctatttaaacactcagtacttaagttaacaactttttcaaataagtctaccaaattatcacctatatcaagtatgttactatgttcaatcaacataccgcagtaatgagctgtagcacaagcttttgatatatccatttcatttaaggatattcctaagccctttaatgtgtgtaatacattatcattatttgaattttctttaacatatacatatagttcttgaaattcatcatttccaaatatctttaaaatatctagtgattcatcttctctgcaaggctcctttgaccacttaatatattcttttagtatattatttaatttattatacttaacctcttccttcttctcatttgtcacaatatcatctctatgtaactgtgctgaatctatacctgattcatcttgacattttaaatctggtttattaccaaataacttattaaaaaacttcatatatttttactcctgttattttaaaattaaatttgtgaattagtatttatgctggacaagtaagctacttcgcatatttcttttggtgatattatagtttcttgtgtcatatatgctttatccattcaatctcacccattttaatacaatctatctatattctaacataaaaataagagtttactctacataaactctcatttaaatccaattatttacttaatagtttcaagtccagtcgatttcctaaatctcctgcgttcctgtatcttcttgtctctatccttcaaaagatcctcttcactttaacctaaactatatacaatcctaaacaatacttccataacattagctaattcttctaaattaattttgtatagcaaaaacattcagttgtatggtcgttaaccattcctactgcttgcataaaggaataacaaattgtacttccaacaaatttaaaaccatccttttttaactgcttactcattttgtcacttaattcagttgatgctgggacttctcctatacgtttccacaaattaataataggcttattatctacaaacttccatatataattggaaaacgagccgtactcttctctaattttcagaaatgcttttgcattagttacaacgctttcaatttttcttctattacgaacaatgcctttatcttgcattaattgctctaatttttcttcagtatatttcactatcttttcagcctcaaaattatcaaaagcttctttatagttttctctttttttaagaatagtccaccagcttaagcctgcttgagctccttctaagcacagcatttcaaatagttttctatcatcatataccggtactccccattccttatcgtgatattcaatatataattcttcttttgtcacccattcacatcttttaataatttgaatcacttccttttaagctaaatcacaaaacttgctgtattcttcactgtcttttgcataaatctaatcttaataaacacatgacagtgtttattaatctatattataagtatattttaccataaaataagagcttacattacgtaaactcttatcatatatatctttatattttactgaactcaaatcattttactttcttcaagctccatcaagaatgaaggctttatagttaagaatcctttttcattattgcatatgccagcccaatctaaaattgcaaatattacaaagcctggaccaaatgcactttgtccttctttcactccatgtaccttatgtgctacatagccttccacagaattcaatggaagcttatcatttccgagtctggcgccctttgatctagcacttccttttggtgctttccctccattatttattacaacttctacagctgcattaaatgcttcccatgttaattgatctggaactggtattttaggtgaaacaagtccatttttatttgaatcgtaacttatttcacaagaatcacctctaaataatttaatggatgcatgtccaccagattcatctaacttttctctaatttttcttgtaacaagatttcctatacatacatcatttctatttatatctatggtcactttatctcgcttttcttccatttcactttcattattaatttctttttctcctaatttaatttcttctacattatttataatttctctatcaatattcttacttttaatattttcttttattagacccgaattcattgaattacatttcaaattttgtttttcttcaatctgctttatatgattttcttttacatctttactaacacatgtataagactttaattcataatatagctcaataatctcacctgctgcaaatactttaggagaattacttataagcttttctatcgttttgtttaaggtatgtctattaataacttttacattctctgagtgaacttccattttctttataatgcatctttcactaaaaactataattgactttactaacttttcgtcaactttcaataattttattaagtattttatatgagtattgttttgctttattggattataaaacttttccttctgtccgttctttaaagtttgcatccaatacttacttttctcatctccaaagatccaaccactataattttttgattctaaaacataaattcctgtctcatgcaaatatattaaatcaatctctgttgtttctccattttcctttggtaagtatacattagtaagtattctatgctccccttttattttttctaaaatattgaaggatagatactctccatatttccccttgtccatcataactccaaagaaaccatttcctgattcttttttgtaattgcttttatcgtatttactcttctttaatgttaaaacaataataattactaaaattattataatatataactctatcatataatttctctccctttacccttaatttagcaatcaaataattaaattacatattctatacatagtaactatattttaacataaatagttgatgcttatataaagttttatcaaaaaatcattttgccctcaagccctcatatttactacaactcataacgctgttgcttgtgctcagtatcacattgcctatgggtagacattttagtgtttttaattgtctatcctatacggtaacattttatatctcatagtcctccatgatttttatatttactatatttgaatctttccatagattctatatagcaaattcaatcttttttcctccacaaatgtctcttggagtacttctgagactctaagtgttgaaattattatcatttctttgaaaaacattccaaaagttaaataaatttgttataatatgtatatataatgaataaaatgtaaaccatggtaattatagtatggaagctttattattctagttaaataaataaaatgttatattttaaatattttacttattcattatgtacaattttaagtgagcgaggtgatcataataaaatcatgctacatgcctttaaatgacaattgagcacagagacctaaactattaatgcattttttataaaactttaactaacaattatttcaagaatattagaatttggagggataatttatgttcaaaaaagctttagtaatggtttctattttagtttttcttttttgtccaatatccacacttagtgtttcagcagccgactttacaaacggcgtagatgtatctggaaatactgcaacaatatggtttaagccactagcaaacactagttgggttgatgtacattataaaattaattcaggagcacaacaaaatatcagaactacctataatagcgtatctggaagatatgagcaaaatgtcacagtatcttctggagatactgtgagctattcattcacatataataacggtactcctgcatatgactctgattggtataattatacagtaggctctccgtcttctcctacgaaagctgttacgttctatgaagatattaattacggaggagcttctgtatcactacaacctggaaattacaccttgtcacaattaaatacagcaaaaattccaaatgattggatgacatcacttaaagttccaagcggctggacagtcgatgtatatgaaaacgataactttacagggacaaagtggacatatacttcagatacaccatgggtcggtaatgatgctaatgataaaatgacttctgttaaaatttattcaactacaaatactggtggtgatactactactccaccacttaaatccggatttgttactttacaagtaaaaaataatacaaacggacaatattcaaatgatcagatttactgggctattgtaggaaaagacccagacactaaacaatttgttcatgttgatttaaacgggaaccttattcctatgaaaatttcagataatgatgcagctggtcatttaactaaaactactcctgatggaacatttaactattcaaattatttctgcaaagccagtcaacaaagctatgcttatattcccaaaatcataggagcaagaatgtacatcagttatggtaaacctttatatattaaagtaaatcaagcagcagatggattaattggatatgctggaccaaaccttgcaaacacttctgatcctaatacaggcattatgtttgaatgggctgagatggcatggactaatgacggattatggataaatacaacaagagtagaccaattctgttatccttataatatacaattagtaggtaatagcggttacaataaaacttatggagatactggaacacgtgcagatttaatgaatgcatataaaaattctgtacctgctgaatttaagtctttagttcattctgatagaatctatgcccctgcttcagggcttggaacttttacagcatcacaagctaatgctcactattttgatagttatatcaatgacgtatatagctattacgcaacccatgaattaacctttacatgtgacagaggaacttatagtggacatgttgtaggcaatgattttgtctttaataaaaatggtggtgcatataatctttatatacatgggaaaccaagtacacaagaagttttattaggaaatggaatctttgatggtggaaatgatgatgaaaaagccatcaaagcacaggtttgtgcagcctttaacagacatgttatgcttgatcctgcacactggaataactcagcctatttctataaagatgctcctgctaattacttcgcaaaattctggcatgatcattcttatgaaaacaaatcatatggcttctgctatgatgatgttttcgacttcagcagcacattgcatgtagctgaccctaagtatgcaataattaatgtaggttggtaataaattaaataaattagaccataagatttgtaaaaagatgctgtatcaaaatttgatgcagcatcttttttattttcttaactactttcatcaaactaaaatactttatattacatgcaaattcaaaaaaatgagccaagataatcttagctcattcttttacataaaactacaactccctttatctattattgaatttgccataaagctggtacagcacttggttcccaacctactaatgaagtgtgagcctgaatacatttataagtaccgccattgtaagttacaatatctccagctttgtatgcatgatttgcaacccatgcattgttagattcagaatctggtacagttactgtaactttgttagagttaatagaatttgtactatcatatagaaccactgtataatcatagcttcccttagccttattagtaatagcataagaaatgctaacttctcctacacctgaagttagagctcccgtagaagcaactgttgttccttcatatatcttgtagcttgttgcagtattattttttggaactacagccgttaaagtatatgctccattatttactgaactagcagataatattgctggttgtaatgtgttatctcctgcttttggaactgttacagttatttgatttgaagtaactgtattgcttccatcacttaattcagctttgtagatgtatgcccctggagcttttgatattgcattatagttaagcgtcttagcaggttgtccagctgttaaatttcctgaagctactactgttgttccctcataaatcttataagaagttgcagtattataagctggaactactgctgatatagaatagcttccattaataacttctgaagagcttagtactgctgcattaagtttatttaaaggtggagttaaattattaaaataacctctaaaataattagaccaattaaagtttgtatattgatcccaatttattgaccaagtcataagacctcttaaattaggatatttattgttaatcttataacttccaactgttccaccattgattaatccatctaaagcactttgtacctcagcatttgaaacatatccatttccagcagaattacaacatggaacaccaataactacttgatcttgtcttaatgctgggaagaaataattagaatcattatttacattaaaacctgttaaaagcatatctgctaaagaagcatagaattctccacttcccattgattgagctttaccattaatgtcatttattgaacctgaattataatattgcacttgaagccagttcaactcatctctaagtccatagattactggtaaaaatgctccagctctgttatctacatagtaacagatgttggttctccaaatgaaaggttaatgacatcaaagtttgatgaaacgtccttgagtttaatgtctcctgacccattattaaaattgtgccagtagcctactagtacatgattgggaatactactgcttgttaccgcagatgcactatttgaattacctaataccactcctgtaaccataaggcttgccatagctatgactgaaactatctttttaaaaaatttctttttactcaatacttttctctccctcactttaagattttatttattttgccaaaaatatcagtaaactggaacccttttataaaacatttaatttccctattaatatgcatattgcaattagagcatatgaaggaagcataatgatacataatctactataatactagccattcccagttaaatctaaaaaagatgactcctgaaaagtacagaaatcatcttttagaagctgcataggcccttttatagagatctattttaaggtttatgctttctcttttatatacatttaatctattaatatttatccattactatacgtaacttaaaatattaatctacagtatctttaaatgtaacaacttgatttctataactatcaaccttagcctttacttgattagttgtaagtgctgtatccttttcatggaatacccagtctacatattctgcatttatattaatacccataaagcaggaacatttgatggttcccagcctaccaatgaagtatgagcttgaatgcatttataattcttaccattataagaaactatatctccaactttatatgcagtattaggagcccagcttccagtcgtaggattgcttgaagccttagtagtggcactgatagaattactccaactgcttgttccattagcattcttagctctaacagcataagtatgtgttgaattttcagttaaaccactattaacataaggtgatgttacattactaataacgttattatcaacttttaaatcataacctgttgcacctgatgatgcgttccaagacacattaatactagattgattgctagcagctgcagacaatccacttggaacagctggtgctgtaggtgctggtgttggattattatccccgtgctgatatacacgaacataatctacatacattttagctgggaatggagttgatccatcaggattacctggccaatttcctccaactgctagattaaataatataaagaatggtttatggaactcttcagtaccattaatattatttgctatgttagcttctaaatattgtgttccatctacaaaccattttattgatgaagcgtcccattcaattgaatatacatgatattgagttacatcgatattaggtgaagcagcgccatactgtgcatgcgtattgttaccagtgctatcccaatgtatagttccatggattgcactttcattatttatatgttccataatgtctatttcaccacattttggccaactaacttgagaaatgttttctcctaacatccagaatgcaggccatacaccttgtccagctggtaacttcattcttgcctctacttttccataagtccagttttttaatccttggctttttaagcgagcagaagtataattcatcccattataattttcttttcttgcttctataacaagatttccattttcaattcttgcattttcagatcgattggtataatattcaagttcattattaccccaaccgtctccgccagtttcatatttccaatttgacgtatttatatttgttccattaaattcatcactccatgcaagattccatcctgtatcagctttcgctgtaactgttggaataaatgatgaaaccataagtgaagaaataactaatgacataattagttgtttttttcttttcataaaaattccccctatacctctatttattattattattattagtagtagtttactccccccttatttacataaatatttgattgaactttgttacctttttgctgaacttttttcatatcacctcctaaattaattacttttaacgtacactatattatacgtaaaaagattctatttaagtgggataaattataaattagaacaaattatacatttattgtataatcgaatgcatgaaagatcattattctttctgagacacacttgaataaaattgttattactacaattacctatacattagatccattaaaaaaatcttgtatatattcctttgaatacgtaaattctgttttaaatatcaagcttactacaattatgaatttcctatttctctcaatggttcttttatgtacctgaaccattgacactaattcctttaacggaatggatttatttcgaatcaattttccatataagtaatcattatcacataattcttttgcaatttttatacacataataatagagtccctgtgtttgggaatttcttctccaatatcatatatgtttatattaaactcactcaactttttttgaaagaattccatttcatcctgtgtttctatattctcatattgattaaatgaattagatcttaaatatttttcctcaaaattaatttcatcttcattttcaaaataagtaaatggatatgctttttcttctttttcactttttctataataatctataattctacttcttattatcatgtcacagtaagcgaaaaagttttttcctttattttcatcataattatctaacgcctcattaaaagctatcattcctatactaaatatatcgctgtaccttatatcttcatatttttttgatactttagacacagacttacctataaatggtaaatactcttttatcaatttatcttttaatttaacgtcaccgtttctaattctttctatgtatccatatattgatttgttatctttagtatcatcataaaatagtttactatctgacaatacttttcccccctacataataaatacctctttataccaattaccgtaacgaccaaaatgtaccattctcatatacttaactttgctctaatatatagattttataaataataaaacataatttattacactcctctcctattaagtatttatattttacaatataagtaattatattacattttattacatttgtatatattgttgtggttaaattttaatgttttactaaaaaaagttaattttgtcccacacaaaaattacacttttctcgtattgaatatagtacaatcatatattctataaattttctacagttttatttttttgcaaagtaataggcaataaatataggcgtgaaatattttattgtttattacgcaatagaaaattctctattactgttttaagggggtgaacaatttattattaaagttactttccaaaaaatttcaatgattatatgagaggggttgatgtgttttgaaacacgtaacattaaaaaaatttcttgctttttttgtagtctttctacttacattcacgcaaataacactaatgcctaaagcagcagaaaaatctgataaaaaaaatgttgtagtttattttcctaattggggtacctacaatacagctcacagcagtatatctgttgatcaattaccttgggacaaggtcactgtaatcaatcatgcattctttgaagtagattcaagctttaaactcaattctactgattcttatgcagattttgataaatctttcccacattctgaaggttgggatgcagataaacttagaggacacatgggtgaatataagtattacaaatctcaatatccaagtgtaaaggtgcttatatcagtaggtggatggacaaggggtgctaatttccatgcaatggcatcaagttctagttctcgtgctgtgttcataaacagtgtagtagattttctaaaaaaatatccattcatagatggaattgatatcgactgggaattccctggtattgatagaaaagccgatccaaacgaccaatttgataaaggttgcccaggtggatcagaggacaaacaaaactttacttcacttcttcgtgaaatacgtaaagcttacaatgataatggattgtctaataaaatgcttacaatagcagcaccatctggatatgataaagcacaatatactgaacctaacgtttatgctcaatacttagattttataaacgttatgacttatgatatgcacggggcttgggaaacaacgactaatcatcatgctgcaatatatccaaatcctaatgatccatctggaacttctcctgtagatataaaaaataaatataatactgattcagcaatgagattgtacagggacacttataatatacctgcaagcaaactaaatgttggaacaccattctattcaagaggatggaaaaatgttgtgaacaatggtggaagcctacctggattatttgcttctgcaaatggtgcaccagtaggtacatgggataatgcacaatctccaggtggacaaaacccttattttaaaatgaaggaattggaaaaaacatcaggttacgtaaaatatagagatccatatgctaaagttccttatctatataatgcatcacaaggaattatgtacacatatgaagatgaagaatctcttacagaaagatgtgattacgtattaaataacggttatggcggaatgattgcttgggaagtttcaggagatgacccaaatggattcccattaactactttaatggcaaataaactttctggcggaagtaatccaacaaccccaactgacccaacaaatccaactgacccaacaaatccaacggatccaacaaacccaagtaatcctggtacttcttatcctgcatgggatagtagtaaagtctatgtaaatggagatattgtttcttataacaataacaattacaaagcaaaatggtggactcaaggtgataaacctggtgcttctgatgtttgggaattaattggagccgctacaccaactaacccaagtaatccaattacgccaacaaccccaactaatccaagtaatccaacggatccaacaaacccaagtgatcctggtacttcttatcctgcatgggatagtagtaaagcttatgtaaatggagatattgtttcttataacaacaacaattacaaagcaaaatggtggactcaaggtgataaacctggtgcttctgatgtttgggaattaattggagccgctacacaaagtaatccaaaatactaattaaataataacatttaagtgggaacgtataatttatatacatttcaaaaatatatagaaggagttgatgtattatgaaatacatgaaattaaaaaagttatttgctctcgctgtagtattttcgtttgcattaccacaaatgtcaatgctagccaaagcagcaacaacaaaagcagacacagtgattgtctctgcatctgtatcttatgctaattgggatgccaacaaagcttatgtaagtggagatactgttaattatgaaggtaaaaattataaagctaaatggtggactcaaggtgataagcccggttcagctgatgtttgggaattgattggaacagcaccatctaaccctagtaataatacttatgctgcttgggacagtagtaaggcttatgtatctggtgatattgtttcttatcagaacagtaattacaaagctaagtggtggactcaaggtgataagcctggttcagctgatgtttgggaattgattggagcaggacctacaaatcctacaaatccgactaaccctacaaatccaactaccccatcagtatcaaagcctgctgaagctccagatgatatatggggatatgcacttaatgctgataacaaatttggtaaaaatggagattttgctttattaatatgtgctgttattaaaaaagaatgtaattatggagcaggtttaggtggtagtccatcttctggagacggattaatgcaagtagaaccaaacactagaaatgcttattcgagtgagttcagttcaacatatggacatgcctacaatcatagtaatcttcaagaccaagtatatatgggatcaatgatcataaatgataatattaagcaatttggtaatatatacaatggtctattgcattacaatggaggaccaaactggtatccaggagctacagattcatatggccgtccaattctagcagatcaatatgcaaatgcagtgtatgcgacatataaaagctatggtggaaaaaactagtaagcaaagtaaatggacaagtccattagaatcaaaagtattttagaattatatatatgttgcaattcacaattacagctaaaattctcacaatatttttagaattatgatgaagaattatttttgcaatatatataacaactgagaagaaaatacagttaacttatagatttaaagaaacactctctttgagaaaagggtgtttctttaaatttatgagctaaatggtggacattttgcaaatgttacaataccaagtagaataacaaaaatgagtaatgctatctttcttaattgcttaaatttaaccaaaagggcagcgtaaaaaatttaattcatacactgtcctatatattgcatttaaattattatttttttaaatgagctccatttgtagcaataacttctttataccaataaaagctctttttcttatatctttctagagttccacttccatcatcatgcctatctacatatatgaatccgtatctctttttaagttcagctgttgatgcacttactaaatctatgcatccccatgtagtgtatcccataacttcaacaccatcttcaatagcttctcctacttgaactaagtgatcatttaagtagtttattctataatcatcatttactgtcttatttccattttcatcatttattaattcgtcaacagctcctaaaccattttcaactataaacaatggtttttgatatctgtcatagaataagttaagcatgtatcttaatccttctggatctatttgccatccccaatctgaagctttcaaatacggatttggtactccgccaatgagatttccttttcccttaatattcttttcaggatctgcacttgcacacgagctcatataataactaaatgaaacaaaatctactgtattctttagtatttctttatcaccaggttccatttttatttctatgttgttttccttaaaaaatctattcatatatcttggatattctcctcttacatgaacatctccaaagaaaagattctccctatcagcttccattgccttaagtacatcacttggttttggtgttaatggatagtttggtaccccaagaatcatgcatccaattttgaattttggatttatttcatgaccgatttttaccgcaagtgcacttgctactagttcatgatgcatagcctgatataaatcctgcttgtttaattgttcttttggtgtccatattccagcgctcatatatgggaaatgagttgcagaatttatttcattgaaagttagccaatatttcaccttatctttatatctgttaaatattgttcttacatagttttcgaaaaatcctattagctttctatttacccagccatcataattcttagctagtgcaagtggtgtctcatagtgagaaattgtaactagtgtctctattccatacttagctaactcatcaaatacattatcataaaattgtaatcccttttcattgggctctttatcatcaccatttggaaatattcttgaccaagcaatagatagtctgaaaactttgaagcccatttctgcaaatagcttaatatcttctttatatctatgataaaaatcaattcctataagtttcatattatcttctgttggttcatctgttaaagctcccatcacacctttaggtgctatatcctgagtagataatccttttccgtcttcattgtatgcaccttcaaattggttagcagctgtagctcctccccataaaaatccttctggaaatttaattgacataactttacctcctgtgttttataatttataatacttatattttcctataaaatgtttatatactctgtgttgaatattaaattttcaaaatttattttagtaataatgctagcaagcatatccaagaatatcttaactagcataatttattaatattattttatcaagtagctagcatacgtaacactctcgcttatttaatagagagctaacgtctgcacgctcccatacattgtaccccttgagggtataagtccaactaaggtttagatgaggatcaaacctcatctaaatcaagttttacattattacttttattaactcatctttttcttttacatctttatctattagtgataatacatccttgtaatcacttgaattagtaactagaactggagttattacttcatatccttctctttttattgcctcaatatcaaattcaactaataagtctcctattttcactttatctccactcttaacatgagctgtaaagtgctttccacctaattttactgtatctaatcctatgtgtatcaaaatttctgttccgtcttcagctgtaattcctatagcatgttttgtttcgaataatgctgaaatcactccattaactggtgaaactgcgatgcctttacttggtattatagctgcaccttttcccattatttcttctgagaatgttatatcatttacttgacttagtgaaactgactttccttcaattggagttagaattattgcttcgcttttagtttcagctttatctaaggcagcttctttaacttccattttgttttcaattaagctttcttcactttcttcatttgctggatcatcaaatccaataatccatgttaatgcaaatgaacctacaattgcaatagctgctgttattaaagcattaataaagtttgagctaccatttggatcaataaattgaactattgatataagtgctggtgttgcaaaaacataaacttttaaagctacaattcctgcatatagacctgctataccacttgctatcatacttgctattaaaggctttttatattttatagttacaccatacattgctggttctgttacccctgcaagtaaagctgaaatacttgatgcgcttgcaacttgttttaagtctttatttttagactttagtgatactgcgagtgctgatgctccttgtgctaaatttgatggaagcattgctactaataataatgtttcatatcctgggtttgctaaagctgttaatgccataggtacaaatgcccaatgcattcctgtcataactataagtggcataaacgccgccattaaaggtaatgcaatccaatttgctttgtcttgaattgtatacataactgttgataaacctttacctactaagaatccaagtggtccaataactattatcgcaattggcatagctataagtaatattaacattggttttaagaagttctttgtaactgctggtgtaattttatctacaatttcttctatatatttcatcacccaagccattagtattactggaataactgagtacccataacttgctgttgtaactggtaatcctataaatgatacaggtgaccctgcaccaagtagttttacaaaatcaggatataccataacacctattactgccgcaaaagtgtatggattaatattaaactttttagaagttgagattacaagtatcattggcaagaaataaaacgttgcatctccaagtgctgataatattgtataagtctggcttgtatttgataaaagtccaatagttgtaagtaataccactagcacttttaccatacctgcaccaattattgctggcatagtagctgacatacttccagatactacatctaacacttttgtaattatattttgcttttcatttgagctttcagtattattagcactatcactaaaattaccaagtttcaatacttctttatagcatttagaaacttcatttcctataattatttggtactgaccgccttttttcataacgcccattacaccttttatttttttaacttgatcatcatttacaatactttcatcttttagggtgaatctaagtcttgtcatacagtgtataacactacttacattatttactccacctattttttctattatttcttttgcaactattgaataatccatagtataatcctccatttaaaattaagttatttttagattaacttatccatgagcatgtagccgttaactccacttaaaagttagagtattacggatactagctaccgaataaattttttggaattaattttaatgaagtaaagcccgtaacacagtttttctgcttacagtaactaccttgcatttatgtttattttgtttataattttataaaaaatatctaataacataaaagagcgctcattttacatttctcaggtatagattacattgcctattaacagtcctttttattcagtttgctttgtaactctgttgatatgaactgctaaatacatcatttcttcatcagtaagctcagaattaaattcactctttacgtattttttaattttctctgcacatttatatgcttctttatatttttctctcattattttagaaaggcttgtatcctcatcttcaatttcatttcctctaaatattctttgtgaaaagaattttaaatgagtaataaacctttcataatgaagtgaatattcatctaattctaacttataatgaaattttactatgtttaaaatattttggatcatattagtcatgctcatagtatcatctatattgctagaatttaattgagcatttacaatatgtaatgcgatattagcagcctcatcttctggtaaatcaacatgtagtcttttttcaattatttgaagggcctctttaccaattaaaaactcatgattataaaatctttttatctcccataataacgcatttttaaattgtaatcctttattaactctttccattgcaaaacttatatgatctgttaatagaatataaatattatcattaagcttcttacctagagagtatcttgcataagatactatttcattagttgtttgtatgacttctaaaggaatatctgataacaattctattaacttatttgaataatttttatcttcaagagaataaatcttttctactttatctttatcaataatttctccaggctttttcttaaatccaagtccacatcccataacaagaacttctttattgttattatcaaaagattgaaccaaattgttattaattactttctctatcttcataaatattcccctttggcataagttaattaatttaaaagacacactagctattagtaaaatgtaatttaaagtgctttatttaaagtagtttttattattgtgacacaaaaaaagaccgtaccacaacagataatactactaaatactatctataaaatggtaaagcctgcataaccagtaacattccttttaatttatgttaaggatatcataagattattagcatgtcaatcgttttctatgaattatcaataacttctatatatattttctttttaactattagaattcttctaatttaatattatttccaaaagcatatctagaagaatcagatacgcttttaattgtttaatataataatccgctccaataagtgccgctgaccagccagtaaatccgaaaaaatactcattaaatgattcattgaatatagcaattttactaaaataatcatatgtatccctctatttgttctcgctttagtaattgccacaactgctccgccatatatgctgctggataaggcattgaatttacaatccaccattccattacaccaacagcggctgaagcaacatattgagccattatattcttgcttatattttcattgcttccagtcatgtcaagatgctcctccatacttttaagagccattgttaaaatacgttccctaaaagcaggcatagctttgttagttagcatatttgaatagaaaatagcatgcttttctagatattgaaacgtctgaagtagcgaagctttggagtcaaaattgctactctctccatctgaaatgcaactgtcacataattgatttaaatgagtatctatacatttattcatcaaatcaaatttgtcttcataatgcagatatacagtgccacggtttacatttgcctcttctgcaatttcgttaatggttatcttttcaaaatctttttccgacatgagtttgataaaagcacccataatagcctgttttgatttttcaatacgtctatccataaaaatatctcctttatgtacctaatgtacttccttgtaaactgatttatcttataataatcaacattcatatgtgttttgttcattaataaacaaatctcattgttttaactattgaattgaactaacttaattgataaatttattatattgaacaagtgttgaaaaatcaatattcgttgaaataatgaaaggcggaattaatttgaaaatattttattttactgctacaggaaatagtttatatgttgcaaaaaagattggtggagaattgtattcaatacctcaaatgataaaggaaggtaaatatgaatttgaggatgatgctataggatttgtatttccttgtcatggattcggaatggcgaaaataattagtaactttataaaaaagtcaaaatttaaagctgattacttcttttcaattatgacatatggtggtaattcattctctggattaaggcacatggagcttgtggccaaggaatctggaatcaagttcaactatacaaatgaaatactgatggttgataattttctttcagcctttaagatggaggatgagataataaataagaatccagaagttattgataaaaaactaagtgaaataatagctgatattacaaatagacgaacttctcttgtgaaaaaaggaatcgtatcaaatactctatctaaatacggccgtggctttgcagataaaatcagtaataattttgcagctaagagatttattgttacggataattgtactagctgtaaggtatgcgaaaaagtttgtcctgcaaataatattaaagttaataacaagcctgagttttctcataaatgcgaagtatgtctagcatgtatacatcattgtcctcaaaatgcaattcatttgaaatctgagaaaagcaaagctagattcataaatcaaaatgtccagcttaaagaaataattgcttctaataatcaggctaactaataaagcataaaacataattaaagctggtcagatatttatatgatgccttaagaagtctattaatgctagccttagtttaaaatgaaaagacattgatatgcctaacattggggtgcttttgaattatccgtgcacccctaatattgaaaaactattattagaataatagtatctatttacaattatgttattcgtaaagtccccagcctccactgtactgatgaggtgactttccttttgattctataatcataggttttaaaggaactggtgcttcttcatttatttcggcaagctccacattaaattcccattcatctccaaaatcaaataagtatagaagtctttctcctttataaagatttaaacttgctatagtcgtaatttctgctataggtccttcgtattctgcatacttacaatatacgccttttcttctgttgcctcctataaaaaatgcatataagtgatcattatcaaattcaaaggcttcttgaatagcattatgtaaatccccaaaagtatgcttatatgctaaatttatttttctccatacagtctttgataaacttactttaaaagtatacgttccacctttatttatcttactttcttctactgtatttttaacagtgttccctttaaagatggttttaaaaacatcaaatgctttttcgtttttgttagttgtaacttttaaattataatactctagtagtactggaacatcttctctattccagtactgaatagcctttgttagaagtaatatacttgttttaatcccaaattcatttggagaaaaactttttatcgtatcttcataccttgtttttgaaccattaattaattctatttcaccaaaactcaagaactttaaatgatgaaaaaatgcagccccagttgaatacattacatttgaaatatccatttcatcttttacaattatatctccttgtttagcactagctatctcagctaaaatattgtaaaaagctgctatattatgagttctatcaaattttatttcaaaatcatatttagtccaataagtttggagtaagaaagcatatttttcatcttcatttaaactttgaaagctttctaacttatctgttttaaagagtcttacttttcctttttcatcgttagcctttatataaagcttacttgcaagaactaatgaaaacatcaagtctattgcaaaatatttatcttgattataactaggatttattacatcctttttattttcaaggatcatgtttagattatagcaatcctttctgcctaatacctcctgagtcgctgagagtataggcttttcattctctataaattctataaatttttcgaaatcgtttattgtactgttaatattgctcattcttattgatccatcctcaatttttatatttatttgtgcttcaatttcacagcttccatcttttctaaaaaagaacatagtattttcttaacttcatatttcccaaaatcttcttcaatatacatattcataaattctttttctgaactctcaagaaaatctgcaactttttagaataaatcttttccgctttgtctttgtcaataatttctatataaaactcataaagtagttgtcaaatgataactatattgttataatatatcttaattaataataattatcaaaggagttttcatatgactaaaaaagataatagagaattaattttaaatatggttaacttttatagtttatttaatgttgagtttatagatctaattccagacctaactaatacagaaataactccccttctttcaaaaatactgaattttattcattttgaaggtactactacagcatcaagaataagtaaaaaattaaacatatctgtaccaaatacaagcagaagtattaatgctttatataatcttggttacttgataaaaaaacaagatgaaaaagataaaagaattgtatatttatcactatcaaataaatcattaaatcttatttcatctgttgctgcaactggagaagatatttttttagaacgatttaatgttctttctaatgaagaaatagctgagttatctcaatcactattaaaagctcagaacttgattataaaaatgcgagatctatatgaagataagaaaactatgaaataaatattaaggagatgattaaattatgtttgtaaaaactataaaatcaaaattaattattctgataagtatattactcttagttgtaagcactggatttggaattatttcttatattaatgcatctaacgctttaatatcaaatattaaaaagacattaccagaaatagctatccaggcttctaatactgttcaagctaatttagataatcaattaaattcactggaagttactgccaagactgcttcattaagcaatgatactccagataaattaatgactattttaaaagctgaagcaaaaagaaatggcagtattaaaatgggatacgctgatatgaatggaaacattatatatactactggtgaacaaactaatataaaagatactacttattttaaaaaatcaatgtctggagaaaattttattaatgatcctgaagttaatgaagacaaaactgcaatgacaatggtatattcagtaccaataaaaaatgatgactcaattataggcgtgttagtatcagttagagatggaatggaacttagtgaaatgattaagaagatctcttttggtgaaactggaagtgcctatatgattaacagtcaaagcaatagcattgcttataaagattcaagtatgccattaaatcaatataattctataaaagaagcagaaaaagatcctagcctaaaaggtatcgctgatatgcaaaagagaatgatagctggcgaaactggtttgagtttatatacttttggtggaaaagaatcttatggaggttttgctccaatcgaaaaagaaaaatggtctgtagttgttattttagagaaatctgaacttctatcagaacttagctccctaaaattctcaataccccttacatctatattgtttttggttattggaattcttgtaatttatattatttcaaatagactatctaaaagaatccaatatgcttctaactccttaaacatattggctactggaaatttcactaataagataagtgaaaaatatttatacattaaagatgaaattggtgatatcgctaactctatgaatactatgcaaaactcaattggagatatgattaaaatgtctaaggacagttctctaataatagatgaaaactcaagtaatttatcaactatatctcaaaatatggtcttatcttctaataatgtggccaattcaatgcaagaggtagcaagtggaattaattctcaagcgaataacctaatggaaatcactacaactttaaatatcttcagtagtaaacttgaagatattgtaattaacactaaagatatagataaaaatacaataataatgaatgagcttgcaaataatagcagctcaagcatgaagttattaatggatacagtaagcagtataagtttatcctttaaaaatttatctaataaaattattacttttagcagcaatataaaagaaataaataacatagtacaaattattaattcaatagctgatcaaactaacttattagcattaaatgcatctatagaagctgcaaatgctggtgaagccggaaagggttttggagtggtagcaaatgaagtgaaggtcttggcagaacaaacaaaatcttcatctcaaaatattagtaaattaatatctgatatatctaaagatactaatgtaataaaagatgatacaaatagcatgaccacagatcttaacaatcaagttagcattataaatgaaactataaactcatttgaaaatataattgatgttattaaaactgtaattccaaaagtacaaactgtaaatgtggcaactatagaaataaataaagaaaaggacgatattcttgataagattgaaagtacatctgctatagccgaagaaatatctgcttcatctgaagaaatatctgcttctactgacgaaatgtacaagctatctaatgaagtagcaaaatcttctgctaccttaaataatatgacaaagaaattaatcactgagcaaaataaatttatagtttaattattatggaatatatttaatttaacaaaatatttggaggtgtttattatatgattaaacctttatttctagctcatggttcacctatgatggcaattgagcaaagcgtgtatactaaatttttaaatgaccttggaagctctattaaccccaaagctatagttgtgttcacagcccattggacaactgaaacacttactatttctgcttctgattctatatatgatactgtatatgatttttatggatttccagaagaactctataaaattaaataccctgcacgaggttctagcactattgcaacaaaaattaaaaataaattaatagattcaggtattgatgtaaaaacagatctaacaagaggcttggatcacggtgcatggactcttttaaagcatctttatccaaaagctaatataccagttgttcaagtttctataaactatactctacctattgataagcagattaaaataggtaatgccctaaaagagcttggctctgaagatattttaattcttggaagtggaaatacagttcataatctaagattggttgattttgatagtaagacaattgattcttggtctaaagaatttgatgattggttgattgacaagataggaaacaaggatctaaatgcccttaataactataaaaaatatgctcctcatgctaacttagcagttccaactgccgatcatcttgtcccactatttatagctttaggcagcagttctgaattaacccctagagttatatttagagattaccaattaggaaacttaagttatctttgctatgaattttagacagatttgccttgaacctcagcattctcagtttagattttagttcttttgataagaggatttatgatttcatttgtcattaatcctcttatctgttttgtttgatgcttgctctcttaattgtaaataaaaataagtgcaaatgtataactatttatttatagtctacacttacacttatgcagtaacaaataagagcctatttacataagctcttatttttatcactaatcattagtttgagaattcttgtgttcccatgtatttgttatttccgtagattacacctataccaactttagtatatttttcattcatcatatttgctctatgacctggtgagttccaccattgattaaataattcaactgggtcagaagtgttatatgcaatattctctcctgctgtagtataagtatagcctattgtgtgcaaccagtttgtccactttgttccgtctggatttgtgtgatcaaagaaattattttgaatcatgtcgtcactcttatatcgcgcaacttgcactaatgtattatctatagttaatggctgaagacccgcttcttttcttttttcattcattaattgaagaattttatcctcagcagaattttgcatactgattgaataatttgttggcagattaggtaacccctgcacatttactgatgttgcatttgtgccgctttttgaaactgcatctgtattactagcattattcgcattaaacgtattcacaagtgaatttgtatttaaaagattatttatatttacattgttataatcattaatatttgaattaattgttgctgcagatactcctaatgatgagaaacttcctattgttgtagctgcaataactgtagttactattcttcttaaaccattctttctcattagtttttctccttctatatgttttatttgtccttataatttttatttaaacaaaaagtattttttaagtttttgttgctttcgagtaaggacatgtctctatcttatcatcttttcgacaatattcaacacgaattcttctcaatttattgatttaaatgatattgtcttgaacttgctttagtatgttcctgtatacgtctttatgcaccataaggcacatgaaaatatatcatttaacatcttaaagtaccaaggatactcccctattctttttaataaaaaattaaaatgtattttagcatctaactagaatcattggatttatacaggctaaaaacacttttatagcatatttcatttcacttttttatgtacactatttatagtaagatttttaatcaaatttaaagatcttacctattatttatttttaaaatacctatcttactaaatataattacaaataaaatgcatgaaatcataaatggagttatactataccccatatttgaagatggattatttgcacacattccaattgaaaataatgaataaggaaaatatagaccgaacccttttgcgctaaaagccattcctataacccctccaagtaatgaaatacctattggcactgcaaaactttttattataagcgagaatgcaagctgaatggatacaattgcgctgcctgcacataatccctgcaaaagccatagaaacatttcacttggaattggtgttgtgaatccagcaaattttccggaaatataaaataatattccaacaaaaatttgtgtaaaaaatagcattttcataaccgtaaggaactttgaaaaataaatgctgctagttctaacaggtgatgttaaaatactattccagttgttattcatattttctaatctacataaatatgcacaataaactcctattaatgctggaaggcaaaagtaacaataaaatatagtatgttgtgtccaaaggctataccactcttctgttaatatctctttattactcaaataattaaaggttcccatgaaagctgaaatacatggtataatgaagaatgcaatccatataggtgacctgtgaagttttatttgttcagcttttagtgtacgtaaaaacatatctaaatctcctttcttataaaaagtttttttccaatattgtataggaaaatagtacctaaaagtaataccaaaaattttttaaagggaatgccactccaataaaagtttactatacgtgtacttttatcccaatccattattactggtgacagtattgcgtagtagccccataatacgtatttagctgcattctcaaagaataatgaatatagtcctaaaaacataccagctatggaaactccaaatgcaattacttgattcgtaaattgtaatgacagtataagttgcagcagtattactgttaagttaactatcaatgtgaatagtgcataatagcaaaagtacccaactgggatttcttcagtaattcctcttagcttgccaattaaaatcattgttccaacttgtaatagtgttgttataaacatataaaatccaccacataaaaatttggctgcaaataattgtttacttggcattattgattttaataatttaagattatttcctttatgctcaatatcgcttaaacgtgatccaataacagcagctaacattggcataaaaacacagttaatcgttgaaaatctatagaaacaatttctccatccttgagataattcatgagcattattatatttcatttgccataagccatacattagctgcacaatcaccacagctagtacagtaagtcctactttacggcggcgtattttgtaaaattctataaaaattgcctttttcataaactcactgcctttcctgttagttccaagaaaatatcctctaaactctttttgcgttcttccatcctaagaatcatgatcttattttcataaaataacttattacattttataatgaaatcatcggagatttgcggtaataataaatactcactctcaacttcacaatccatgccataactatttaagataattcttgatttcgcattatctaaagttctaattgcaagcttatggttacttctttcatgaagaattttcaaattatcctggaagatcaattctccatgattgattattccaagagtatcagccatttgatctatctcacttaaaaggtggcttgataccacaactgtcatatcatactttttaggaagtgaacttattaattccctcatctcttgtattcctgctggatcaagaccatttgttggctcatctaaaataagtaatttaggaaaattaagaagtgcagctgcaagtcctaatctttgtttcattcctaatgaatattcattcacttttttatttttttgattatctaatctaacaatctctaacactttatttatatttttttctggtacatcacgtaaagtttgtacaatctttaagttttctactgctgttaggtgcccataataacttggtgattcgataagactgcctacatctcttaaaatttctaatctatttttatcatttgctactttaccaaacacagttatactgccttctgtcggtttaactaatcctaaaatcatttttaatgtagttgattttcctgcaccatttggccctaaaaatccataaacagtgtttttaggtatttttaaatcaacatctttaactctatatgcatctttatattttttactcaaattattagttataattatatgttccacttttaaaaactcctttcaaaatttgctctaggcacatcaaactaatatatatattgcaacatcaagctcacatttaaaattctagtaatgaaacctcttaattaggacaaaatatagaaactcaagtgcaacatatatagcaattgttttcttatgtgccttacctttacttctcttaaatgataaaatatctagattacatcctgatgaaatctaccttacatttaccttaagaatcttaaaattaattctcgaaattttagtgttagtgtataatgattatagctacttcttgaaaattatcggtatatcaattgataaccgtaacttttaacttataacttataatcgataacccaattgataaccgtaaattctaacttataattggaagaaaggtactttaacatggacaatattaaagattgcaaaatattaattgtagatgatgaactttctttgcttactatggttaaagatattatgcttaaggaaggatttcaaactgttttcaccgcctcaaattgtcatatggcaatggaaaaatttaaagaggtaaaccctcatgctgttattttagatgtaatgcttcctgatggagacggtttctctcttatacaaaaacttcgcatgatttctactgttcctgtactgtttttatccgctagagatgaagatgaaaataggctcttagggcttggactcggagcagatgattacatgactaagccattccttcctagagaattaatcctaagacttaacgctattctaagaaggacatataattcaacaattgttaaacctgaagaaaagccaaccttttatttaggaaacatttttattgatatgaatagcggcactgtaaaaaaacaggaagaagagctgactttaacagccaaggaatatgctttgttggataaattatattccaataaaggaaatatcgtaactattgatgcattatgtaaagctgtttggaatgataatttttttggatatgagaacaccttaatggtacatatcagaagactcagagaaaaaatagaaacagaaccatctcatcctaaatatcttttaactgtaagaggtcttggctataagcttgtaccggaggttcagtaatgaagggaataataaaaatacttttacgatatattctctcagctggaggtattgcagtaatactattaataactaactttataatcttagcttcatgggtagtatcatatagtacatattctaatacaaaatataatatatcagaaattgctaatggtcttagaaaagaaaatgataaattcatattatctgaagaagcctcctcaataattacaaataaatttcattgggcgatgctcttagatgatagtggaaaagtaatatggagtaaaaacttacctgaagatgttccgttaagctatactgcttcagatattgcatcttttagtagatggtatttatatgattaccctgttcaatcatggaagcatccaaacggattatttgttcttggtgatagtaaaaatacaacttggaaattgcagctgcaagtgcctgaaaaagttatgtacaatagtactaaatggatatcaactggattgataataaattttacagttgctatgttattagcatttttacttggaattcgtttctttttatctcttcgccagattgtaactggaatgaatgatatggctgaaaaaaggcctgtttcccttaaaactaaaggtgcatttagagatttagccctaaatataaataatacatctaaggaattattaagacagcagaaactaatagaaaaaagagatactgcaaggaataattggataacctcagtttctcatgatatacggacccctctttctatgattatgggttattctagctctttagaagataatactagtttttctgaggaagaaagaaaacaaattagtatcatacgattccaaagtgaaaagataaaacagctaatcgacgatttaaatttgaccgtaaagcttgaatatgaaatgcagccattaaatatgcagtctttttttatttcagaacttattagaaaagttgttgttagctatttgaataacttatatgataataagtatactctagagctttcaatttttgatgatgttcaagattataaaataaatggtgatatgcgattgttcgaacgtgctcttaacaatattatcggaaatagtatgaaacataatgaaaatggttgtgatatattcattgaactgaaaaagcaaaataatgggtgcacaattgaaattaaagataatggaactggctttacagaagatgttttagaaaatctaaatgcttctaatgaaatgcctagtggtgtatctcatggcattggactttttattgtaaaacaaattattgcagtacatggcggagaaacatattttaaaaatttggaaaatggcagcattatatcattgtggatacctgaaatgtaaatctattttttacttaacttacggcatatcttagttattagatatcccattattccaaatattaagtaagtaaaaatatatataacagctgaatcatttaaatagactaacatcaatattataaagcctaatatagatgcacccaatgatataaatgcattaatattgtatctagcgcatataattccttgtattaaaaacagtaacggaaatagtaaaattaatgataaaataaatatacctttgaaatctatactattgaaattagacatgtttgaaaatgaaactattgctattatattcataaacaatgcaggaaataaagtgataatcacacttacttttctcataaaaatgcctctttctttcacaaattcagatactttgaaatagtaatataaaatcttataaatatgacattgttgattttaaaagaattttttcttattcaaattgttcctaatatttatatacattttatttaacacgtttgtgctatgaaaacattatacttgacctgatcataaagtcaattaaataattataaatcctcacgtttagaattaataatttctcagtgtttaaattatttttagccaactgtagtcttttttcagccacaattaactagaggtgctgttcaatggacagcacctctttaatatattaactacatatttaatttttattactaatcattagtttgagaattcttgtgttcccatgtatttgctgtttccgtagattacacctataccaaccttagtatatttttcattcatcatatttgctctatggcctggcgagttccaccattgattaaataattcaactgggtcagaagtgttatatgcgatattctcttctgttgtagtatgagtatagcttattgtgtgtaaccagtttgtccattttgtttcgtctggatttgtgtgattaaagaaattattttgaatcatcttgtcactcttatatcgcacaacttgcactaatgaataacgttttccttatatttatattttattttaatttaaattgatctataatttcttctaactttaaagcactttctgcattattgttagatgcagctaatatagattcatttttgctgcttacatcaataacatttgaaacaatattagcagatgatttagctacttctgatactgaaattgcaacatcttccatgctttttgaaatttgatctacagactcagaaacactttcagaaacttctgcaaagttacctataatttctttaacagtatctccatcctttttatactcagcacttatagtaattagtttatcataatctttaagaacctctttttctataaatactaagatatcttgtgatgaacctgaaagttttccaactgaagctaatacagcatttattttattctgaatttcagaaactgttagtgatgactgttctgcaagctttctaacctcatctgctacaacagcaaatcctttaccggcttcccctgctctagcggactctattgctgcatttagcgcaagtaaattagtttgctttgctattgcatctatactttttgccatttctgatatctcgtttacaacttcaacttctttcaatgctttttctaatccaatttttgtttctctatatattctatctgcattttcccttgatttaatagaatcattattgattgaaactgctttttcttgtatattcaatgcaacatttaatccctcttgtgctttttgagctgttacgttcacttcctctttaacagtagcagccatagatgtaacttcttcaacagctgctgatgattcttccattcctgctgatatttcttctgtcgccgctgatatttcatctactttagaacttacctctgaaaacattttatttgttaattcgctactctcaaggatacttttacttttatctttaataaacaacatactttcgttcagtttttcaactgcaccatttaatgcagttacagtatttcctatttcatcgttagcaactactttcatttgtatatcaaagttaccatctgccaattttcctgcacctttcataacttcttttacttgatttatgacactttttctaattaactgcataaataaaattcccataataatacttactactaatagtataaccatttgttgtttagaactatctgttatctctttagaaagttgtccttgtgatttcattaaattattttgagcagctatcatattttctatacttaaaagtaattcatcttgtggtttctctatattagtaatcatattttgaagttcttcggttgatactccagttctcatccctaaattaacagcttcatcaaatgctgaaaatgctgattcagaatttttctttatttctttatatatttcttttcctttttcagtataaactaagctaccaagtttatcttcgttttcataataaataattttattcttatctagtattttttttgctcattcatataattcatatcattgctaattgatatatttcttatgctaattgcaattttgttaaggcttcctctcatattatatgcagctgatactttctcattttctacgtcaattaattgattaatagttccattaatttgacttaatctaagtatagctagtgaggatactcccataattagaataatcattaatgaaaatgctataattagtttgtttgataacttaattttactaaatctcatcactatccctccttttttttctcaatacattaattatactttaatttaaattataatgtctattatatttattctattttttacttttttcgcataacattgacactttatcatattattttcaaagatttttgttacataattaattaatattgtatgtctcaatatattatctccaatatttcacttatattttaataattctctaatcctttacttttggaattaataggtatacttatttataaagttacaaagcaattttatattattaaaatactgattacgccctaataattgatttaatccaaagatataaatatgatatttttagtatatatgttgcaattcacaatgcacatttcacaattacggctgaaattcttgcaatatttttaaaattgtgatgaagaattaattttacaacgtatatatatgtaagtaaataaaaataagcgcaaatgtataactatttatttatagcctacgcctacacttatacagtaaaaaaataagagcctatttatataagctcttatttttattgctaatctttagtttgagaattcttgtgttcccatgtatttgttatttccgtagattacacctataccaaccttagtatatttttcattcatcatatttgctctatgacctggtgagttccaccattgattaaataattcaaccggatcagaagtgttatatgcaatattctctcctgctgtagtataggtatagcctattgtgtgtaaccagtttgtccactttgttccgtctggatttgtgtgatcaaagaaattattttgaatcatgtcgtcactcttatatcgtgcaacttgtactaatgtattatctatagttaatggctgaagacccgcttcttttcttttttcattcattaattgaagaattttatcctcagcagaattttgcatgctgattgaataatttgtcggcagattaggtaacccctgtacatttactgatgttgcatttgtgctactttttgaaactgtatctgtattaccaacgttatttccattagaagtattcattaatgaattagtatttaaaaaattatttatatttacattattacaatcgttaacactcgaatttattgtagctgcagatactcctaatgatgagaaactccctattgttgtagctgcaataactgtagttactattcttcttaaaccattctttctcattagtttttctccttctatatgttttatttgcccttatgatttttatttaaacaaaaagtattttttaagtttttgttgcttttgagtaaggacatgtctctatcttatcatcttttcgacaatattcaacatgaattcttctcaatttattgatttaaatgatattgtcttaagcttgctttagtatattattgtatgcttctttatgcaccataatattatttaacatcttaaagtgccaaggataaccccctattttttttaaaaaagtaaatcttataaaaaagaataatatataatgaactatatgttccatatcttattctcatctatattccaatacttactttaataacgaaatcacttgttcgcttgttctaatcttacctattctagggaatatatatttacaaacatattcatgttcttccttagttactgctgtcattgcatcttctaagaaaatttgattatagccatgttggaaagcttctcttgctgtagtatcaactccaatgctagttgaaatccctcctaacacaattgtatcaatccctctacgtcttaattgtaaatctaaatctgtaccataaaatgctccccattgcctctttgtaacaatatgaacattcttagtccctgctatttcaggtacaagctcgtcccagccttcttgatatttcattccactagaagctaaatctgtttttggcttaaccatatcttttccatctacagttgaaactcttactaaaactataaatgcacccttctcaccaaattccttaactaatttactagcattttgaattacctggtccattaaatgaggtgaacctgaaattcctccacctgcaattcctttttgtaagtctataagtacaagagcgctagttttagcattaataagttccttttcgtttaattttaaatcttccatctttcttttctccttttcattcattttatttatataataattattgatttaaactaagttttttataaactttgaaatagacccaaactgcatttataaataataatgcacttgtaatgaaaaatacgtatttcattcccaagtttcctgctacttgtcctcctaaaactgcacctccaaatgcccctaaatatcctgccgacatgttaaaaccaaatactctgcctgtaagagacgctggagttattttctttagtacgatatttacagatggattaagcccagcagatgctattcctaataaaaacctaaggcccattaattgccaagtgtcttttacaaaagcttgtggtataaaaattattcctgcacctataatacatgctagtattattttatgagctcctactttatctgaaagtttacctagtcttggtgcagcaattatatttgcaagacctgaagctgaaaatgttagtccagctaaaagcacaatatgactactattactagataactgcttaacatatactgttacaataggttcaactgaatataatgcaacagctaatataaagaaagttacaaacattgtaatagtaaggtttttttctggaattgccttccatacctccttaatgcttagaacatctttatcttcacgagtaaaagattcttttacaaataaaacagttgtaataaatgagatcaaaagtaatgctgctgttatgaaaaagacgctttgtagaccaaagatctcatctatgaaaccaccaattgttgggccaattaatgagcctgcaatatttgctgttgaaagtgtacctaaagcatatcctgcattttctttatctgtctgagttgcaataagtgctgtacatgctgtgccataccctgtgatcaccccttgaagtaatcttaatcctattagaacatatacatttggtgcaaatcccatacatcctatagttatggccattccaaggcttgctctaagaatcattggctttcgtccatatttatcagcagcactaccccaaattggtgaaaaaatagctgaaattacataagtaataccaaaggcaattcccgaaatttttgtaattgatgctgtatcttgaactccaagatgctgtatgtaaattggtaatactggagcgatttgactcatccctatggcggcaacaaatatcccaaaccaacacactattaaattttttctccatatttccataagcatactcctttctatttgtataaattaagaacaaaattacatgtaacctcatctgaatagccttttatataaattatcctcaaatttcaccacattacaatttgctaaagaacaaaaaatattagtaattactaatatcttgataaagtttctattacttcccccttaatttttctgtttcttatcttcaatttgattataaactatattttatagtttgtaaattataaaatatagtttataattatattatataatccaaaatgtttttataattatatattgcaattaagtttcaacatcatgctcttgattaacacttgctttattagagctttaaatgtaaatttactatagcaacatatatatttttttaaatgttaaactatttttataagataagattataggagtgaaaagtgtatgcacaaaagaaatctaaccagagaaaagattattctagtttctttttgtctagcagatgaaattggtattaatcaacttaattttcaaaagatcgctgaaaaattggatgtaaaatatccttctttgtataatcactttaataatatggatgaacttaaaattgaaatgacagtatatatgttaaatgagatgaatcaaaaattgatgcataggctgattggaaagagtggttatgatgccataagagaatatgctagtgtttataaagaatttgcttttgaaaataagacagcttataaactttttatcaatattcctagcactaaaaataatgaattgtttaatttaatgagaaaaataactcatattattcatgaaattctaaagtcttacattaaggatgaaattcttttggttcataaaagccgaactttaagaagtctcctacatggttttatttcattatattcctttggatattttcaaggtgatgtggatttagaagatacctttaaatctatgatagatgactttatctcgtcacttaacaaataacccttgtgaaaggtaagaaaatataatattagtatacttaacaaaacaaagtgattaagccacctccccctttgttataggattttaagattcttgtatgaccaatatgcattaactatttaaataacttgattttcaagatccaaatttgtatatttttcttaacataaaaagagagcttactttgtgtaaactctctttagtaaaatcatatatggcttttagttagaattttttacgcccatctttttaaacatgcgaaaataacctagaaagccaacatattctgtcatttacctctattgctgttatattttcacaacaagatcattttgtacttttaaggacaatcccttccttaaatcccccacgttcttctcttttcttatctctagctttaataagttcttcttcactaaagcctaggctgtcagcaagtccaaacaaaacttccataacatcagctaattcttctaagttcttatcttccaaaaattcattaacttcttcttttagtttggcttctaaaagctcatacttctcttctttagttgcgacgtctatatcacattctcttccatcagcttttattatttctgggattttatctcttactaatttattatatactttcattaattctcactcttttcacaattatccacattcccgtattttaatatttttattaaaaattgtattatctaaatgaacttttcatctacctatttatgttcgtagtatcaaatattatgtcacatttatcctcaatgtctagttctgtaaagtaatgttcttccagtggaatccatttatttataaaatcctgaagtttttcttcaccattacgttttagaattcgttcatgttgcactttgggatcaatagttataaaaattttataatcataataatcttttagtgtaggatgcagactatagcttccttcaactatagttaaattcttaggttctacttttataggctgacttagctcccctttattgcataaatattttctatatacagcaggctcgtcgttttttagtggctttaatatttcttcctcaaatctttcgtagtgaacattcccaccaggctgtgctagtctttcttttgttttcattcttggaggaaggaagaaatcatccatgtgaaaaaggctgcaatcaaactcttctgcaagtattgctcctaaggaactcttccctccgccacatcttccatcaatggctattgctaatttttcattatcttttagtaagttcttaatttcatcaaatacatatttatattcattataaatatgtggcttacgttctttattcattatttcctccaatatttaaaggcttactttacataaactcctgctaaagacagtgctttgtttattaataaacatgttattgtaactttaatattattttattactataatatatttgttcaccatttatgattgatattcctctaaatccgtatcttttctacagatattttgtaattcacaatgcacatttcacaattcacaattacggttaaaattcttacaatatttttagaactagtatgaagaactgtttttgcaacatatatattttatatttttctagctttcaatctaattcgcacataatctgcataccatactccattctgatatagaataggttttaagctttttaccgtctcatcaataatttcattttttaacgagtcatctaagcctttaaaaggctgtataacaaacatttcaatccaattcttcattccatcttcacctataagtgcggttttacgatcaaataatgctgcatatgctgtttgtagtccatgctttctaagaataggagtatattcatcaatagttggaaaatagaatgttctcttatattctactccccttgcttcaaaagccttttgcaaaaatgaatggattgtttctgtgcatccgtatcctccaaattcacatactaagcttccgtttatttttaatccattataaacactctctagcaatccatcttgattatcaatccaatgaaaaactgcattagaaaatatcacatcaacttgttcatttaaaataaacttcactgcatcatcctgtataaatgttagttcaggataattttttcttgcaatttccagcatttctcctgatgcatccataccaattacatctgctcccatgtccgaaatctttttcgttaatgctccattaccacatccaagatctaagactttcattcctttctcaatatctaacaaatttaaaacatcttcaccatattgatgtacaaactgaaaatcttttgtataccctttagcattccacttaatattcataaaaacacctccattttaaatatacctgacattaaaaatagtatatcaaaacagataccataattgaaatgcatattaattatactttatataactatgatttatatagagatccaactttaaaacctagatttatgtgttaatttacgaaatcataaatattttgattccgaaaagctatgaaaatatcgctgaaggttctaatcagcaggttgtatccaatttagcatgctccaactttcagtttgacaagctaaaatggaacaacctacaactaagaacctttaacagctcattttcaaatgttttctccacaaatatatttatgatttctagtgaatatatgaacttaaagctttagcagttttgtaaatttgcccatttaataatccaactcccaaatttggtatacatggaaatcccgaccaaaatatgaagttatgaatatagctcaccgaaagcagaaacattggtatttcgcaggactatgaaaatttcgctgaaagtactaatcaaaattttacataaggcttttaggttttaacttccatttatgatacatatatttattatatgaaactgcattttattagcttatatagataacacaatcataaactatacttagcccatgaaatatcctccaaccagaaatggatgatatacttttgtggaatgtttcattggtaattttgatggatgtgattcttggctataagttgttccaaatgtgctagttcaaagcttgttctttgaggctagcactttggatgcaacttcatagccttggaatcacccgtcacaattacctagaaactggaacaaaagtatattattcatttcggtgaggcatacgcatagattatattcgttttatctatatatttaattaaagcagttatagaatttaaattggagatgtatctaaattatgaacaacgttcttttaagtcctgaattttggtttattatcggtattccaattacttttttgcttggatcattagctcactttgcatatgattggagtggtaaatcagttatagtaggtatctttactcctgttaacgaaagtatctgggaacatttaaaactttctacctatcctacttttatttggtatatactaggcattttaatatttcgagataaagttaacttgtatatctgggccatatgctctgtcatttcagttattactagttgtattgttataacttgctttttctatacctacacaggtgctcttggaatacaatcattatttcttgacatattttcattatttttagggctttctatagctcaatgtttatctttgcatatttataaatatgcaacattaactatgcttcatttttatttatctattataataggttctttaataataatttgttttactctttttacttttctccctcctaaattgccggtttttatggaccccattactaaacagtatggaattcattaaaataaatcctctttatatggatcagcttaattttaaacgaaaatttaattaataaacttatgttcaaaatcggatgcttccataggttttcctattaaatacccttggatgaaatcacatttaagctcgtttaagattctaagctgttcttttgtttcgattccttctgcaacaattttaatatctaagctatgtcccatatttattatggatttaataatcgttagatttttatagtttgtttccaaattcattataagggatttatcaatttttattttatcaataggcaatttatttacataattaagagatgaatagcctgttccaaaatcatctaatgatatttttattcccatactcttaaattgttccaatatgtttataattgtttcaaaatcctccatggcctcatcttcagtaacttctaggttcaggtattcaggcggcagagaatatgcatctaatatattttgaacgagtgatacaaattcaggttgctttagttgagaataagaggtgtttactgatacactaaattcatgcgatccaatttcattccactttttgcactgtatacaagcattttctaacatccaattatcgattggtattatttctcctacacttttagctataggaataaattctataggcggaataattctatcaccttgcttccatcttataagcgcttctgaatttaacactttctttgactttaaatccataataggttgataataaaccataaattcattatttgataatgctttatttaatttcatcttcatttctaatttatcaattgctttatgttccattttaggtgaatatattgcaaagtcataaccaccatttttcttaacctcatacatagctaaatctgcattgttaatcaaagtatctgaatcttctccatgctcttggaatatacttattcctatacttgctccaagaattaaagattcttcattataagtaattggctttttcaattccttttgtattcttagagcaatttctttaatgtatatatcagactctacatttttcaatataattataaattcatccccaccaattctgctaattatatcctgtgggcctatagaatctttcaatgtagatgctacttttttaagaactttgtcaccaacttgatgtccaaaattatcatttatatttttaaaatcatctaaatctataaaaagaattgcaaattttttatctttattttttaatagttcattaatattttctaacatcatttttctattaggaatttctgtgagagcatcataatatacataatgacgtattttttcttctgcaagtatcttatcttttatttgatctacaagtttcgaattttttctttccagttttaaagtatatttcttttctatttctgctattctctttctttctgaaatatcatgtatcaaaattacaatacctagtttatcgtcatactcatcatatataactgtacttgataattcacatacaatgtatctttcatctttttgttgtaaattaacctctacatttctcacataactattttctattatagtattaaaatcaatatttttataagatattaaatcgctgaacatctttccttctaattctttaaatttataatctgttatatttgatgacgcttcattacaattttggattgcaaaattctcatctaaaataaatattgggttcttaacactattaaaaatgtattctgataaatacttcgaagtagttaacataaacctatgcttacttattgcatagcaaacaccacccaaagctatagttccgctcaaaactgctgaaggaaagacaagaattccaaacatgggtaaaataatatctgttaatacccccatagtaatgcttataaaacatgtccataagataattttattttgctttcttatcctattcttttttgaatatcttcctctattaaatagcattacaagacctaatacataaaaaattatagaacatatgctgtatgcaatttgaccaattaaatttggagccacatcaatccatccataaggtcttctaatcatagctgaagatggttcaactataatatttagcataaataataatactgcaggaacgtgggctaaaattattataatccgattgtatttactttctttctcattatttaatacaagtgcaaaatacagccagtgaccagaaaaaaaacaatacccaaaaactgaaactgccctccaaaaaaacgctatatttatattttcacaagtcagcatcattgcatatccaagtgcccaagcagcacaacacatgcttaaatttaaaaatatttgattagcttttgattttttgtccatcctgtatccgtatatacctaggaacgaataaaaaacgcaacataacattaatgaaataaataaactaatataaataaaaccacctccggcataaaatattttaataaatttttactttatataattattgagaaactatagcttaaatttcatacgtttctaataaataatttcatatttcaacattttctgtcattatatcattttattcttaatttcataaatattcaagttctgtaaatctatacataataaaaatatttattttttccaataacttcatttgaatacataaactcctactaatgaattagacttttaagaatatagtatattcttaaaataagattacaatacattaaataccataaatatagaggattccgatttttataaacttcagtatcctctattactaactccatttcttaaatggcattatttatcttatcaaatatatttcatattttttattggtgacttgaaaactctcgtgagtttttcctaaacgctgttggagtcataccctttttagccaaaaattgttttataaaatatgtatcatattcaaagccagtggcacgtgcaatttcgtttaagctcatatcagtatgagtcaatagactctcagaaacctttaagcggtacgctagtaagtaggccattgctgtgcagccacatagatcctgaaaacttttatttagtgacacacgattcaaatgagcacatcttgttaaatcttccaatgttattttatcagaatagtttatatgtatatattctaaaaccaaattaacaggtgattcttcgctatggtggtttagctcttcaatcaatccaagtatttgtattaagtatttttttattctacacacccaaagcgagtcactttgtgcatatacttctgttcccataataaaaaaccactcatataatttcaaatatattttctcatctacagcatataccctagtatgaattttatcttttccaaaaagtaaaagaccagtttttatttttagattagttgacagatatccagtattttctgagaaatgagctgtattaaaaaaatctggatggaaacaaaatgattgcgaagatacattttgtttttcaagaacttgtattttatcctccaccgataaacaaagaatacttggagcgacaatttttacagggcgaccatttagttgtaaattcaggcttccactcgtaataaaagttatagttaaacgttccttataaggaagacttacaaagttttcatttgcaataaattctatatatacagttctattcttgtgacgatccatttgtggcataagcattcctccattgggtacattaaaataaataataaatttaaattaccatttatattttcattaatcaatagcaaattctaagacaaatacgaaaaaaaatccccacaccaaaagtcgacagttccacagtcgcctttgagattttgttcttgttcttttacaaatagtatagttaaaagcttcatttatgacattgtatcatattttctaaatggtagactattattaagaattaaagaaagttatgcaaaataagtctattaataaaacttactgttcataactttagataattgcgaaactcattgataaaaatgaataatgattgatttgaagttgcaaaaacattattaatggatttaatggttcctgctatacaaatataatagttgacttcttaaaaaagggcgcacgaaataaagcgaaggtgaattccaatttttataaataaattttatgcaattaatggctttaagcttcggatatatttatgtttatgaattttatctgccacgataactgttattagttgagttattccggctagaagtaaatcagcatgaagtgtttgctcattttgagtcttacgctccgcgacgcagtaactatatttgaagtgatttatatttttttcaacagctactctgattttataagtattactccattcttgggttcctcgtgttattccaggatatgcgcgcagattcttttcaggataaatataaaacattcgtccacataaggaatttgtacatggattttcacattgagttacacgtttgctctttttggtttctttgttatataaccatttcattttagggcatacaaacttcattgttggaattctagaacgaagatgacttttactaccttcacgtttcattggaatagaaggatcattcggacagcatggaatgccgtcttcgtttaaagggcaatcagcattttctagtgtaagcctagtttttaaaggaatatatgctttatcaaattttaattcgagaagaagatcacgataaatttgaatactgtcaaaagcagcatctcctaaaaaggtttttggacttattaatggatgcttgttaaaaaaatctttgagaacagggataagagccttagaatctgcaagagatttatcttcatcaggtgaatcagattttttctcaacaataatatcaggatgagcattgagaaaatctttattatagaacgaaatatctcttacgataccgaggccattagtaatgattccgaatttaaaagcatagcaaaaatgcccattaatatacatttgttggatggcagggttggctgaagcgtgtgatggcatagagccataggcagctttataaggatcataagagtcatctaaattgcatgctttcttaaaatttttaagctgttttataatgcgattagcatatttaggattattttcagtgacaaatgcttcaaggcctgaagtatcaaaaatagtcatggaagcaagagccgtatcaatctgttggcatatcggttcagtaatatcaacaagattatcgaacatggattgtaagtccaaaagaaagtcctgcttgaaacgagtaaacttagatgaatcaggaactcttaaaaagccgcagaagtctcttagttcttgagaatatttaaggaaaataattaaaagagaatctgtaggaatagaaaaaatgcgttgtaaaattaaagcactgatcatagcataaagctgatattttcgcggccttcctgtggaagcgtaaaaatggttaatgaaagatgcaggaactgactcatcaaggtcgatagtgttttcgagtaaagaaagaaattggaatttatcattttcaaatttttctttgcaatcagaataaacatctgccaaagaaagctgtttatatgttatcatatatatgactcctttctgaggtatatggtagttttgtttttaggcaattcaattttaccataaatcagtgaggagttattttattttgctaaaaaaatatcccgcatttctgcgggttgcggcgtttcgcaaacgcctatgttcataacttatatgaaaggagaattattatgtctattaaaaaattcaatatccaagtatctgatgaggtacttaatgatttaaaatacagattggatcatatacgctggcctgagctgctagaaaacttaagttgggaacgaggtactaatataagttatttaaaatcacttgtttcgtattggaaggatgaatttgactggcgtgcacaagaaaaagaattaaaccgcttttctcatttttgctgtaatgtggatgggatagatattcactttatacacgaaaaaggaaagggacctaatcctaccccaattatacttactcatggatggcctgacagtttcatacgctatcaaaagattatcccacttcttactgatcctgcaagttatggtggtgatcctaatgattcttttgatgtaattatcccttcgctacctggctttggcttttctagtgcgtcaaaacatagtggcatgaacaattatcgtgtttctgagctttgggcaaagctaatgactgaaaagcttggctacagtaagtttgctgctgcaggtggagatatgggttcaggtgttacaagatacttagcattaaaccatccagaacttctaataggaatccatctaactgatattggaattatcagagatcttatgatgtcaaatgatacagagctttcaaaagatgaattgaattataagaaaattgcttcagaatggatgtcaaacgaagcaggttatatgtctattcaatctacaaaaccacaaaccattgcctatggactttctgactcacctgtgggcctagctgcatggattatagaaaagtttctcagctggagtgattgcaatggggatttaaataaaatccttactaaagatgaacttcttactaatataatgatttattgggtcacaaataccataggctcatcagcaaatgcatattatgaaaatacacattcattgccaccaatgggacacatagatgtaccaacaggcatggctttattcccagctgatgtattgctgccaccaaaggaatgggctatgcgcaatttaaatatcactcgctggactacaatgcctaaaggaggacattttacagccatggaagatcctaaacattttgctgaagaaattcgcacattttttagaacttatagataagcttgaacttatgtcatggcttaccgaaattatatgatatactcacgtacttttattccacataactgcaacaatacccataaacataacatttttaaaacagcactaaacctcttcttattcaatgaccacaaatgcagtaaatagctactattttagatattagcatcataaatagtagctattttattcacttatccttgctttttccagaatttcagtaatttaatatttagcttatccgtctttattggcctctcctctaacctagtattaactaaagaataaaccactggaacaactacgaatgtaaggaaagtagctgatgcaagtccaaatattatggttacagacataggtccaaataacgcactttttgaaaatgcaagtggtataagacctgtaatagttgctacagaacttagtattatcggcctgaatctttgacttacagcattcaagcatgcttcatctatagaaagaccttcttttcttccttcaattatatactccacaagcagaataccatttcttataactactccaattaaacttattattcccattacagcagttaaagatagttgcatcttaaatgtgagaagccctgccgttactcctattaatgatagtggaagtgcacacattattataagtggctgtacaaaagatttaaattgaacaaataaaatcacataaattattagtatacacatagctgcagctatacccagacttgtaaaattcaaatctatttgatgtttctcaccatcataaatagcatttacaccatctatatccatcttatttatttccggacttaatgcattttctacggtaacagcattataaccagtttttatatcgctatatactgttacagttttatctttcttataatgttttatttggtctatctgtgaatcaagttttatagttgctacttctgataacaataccttgttttttgcaaggctggatttcacttgtaagttttttaagtcttcaactgatgtagcattacttttaactagtatatcgtaatcacttccattttttctgtatacagaagcagcatatcctcttatagcaatgcttatctgcttttctatatcagattttaataaaccatgctgtactgccttagcactatctatatctacttcatattgataagtcttttttgctgcatcatctcttacatttgtagttcctggaataccatttaatttttcttgtatttgatctgaagccgaataaagcttctctaaatcatctcctgtaagtcttatacgaataggtgcacctgttggcattgcttgttccaagagttttactgttgcaatacctccagatattttactatctatttgactttgtaaatactcagccaattcttgtcttgtactgaactttttggttttatttaggtctatgttcatcataatttgagctttatcttttgctggtgcaagaggaggtatagtaatataaaatttaggcacagcaccacctatagctgacgtataacttgtaacatcttcatctgattttactatatcttcaacttgttttactaaatcactcgtgctgtcaatattatccaccttttcattagcaacatctatataaagaatgtctttatctgcataaggaaagaacttcgttcctattgaattcagcaatcctattgatactgcaaataaacataaacatattataataatctttattttattcttaagtccataatttaaaagtttatggaaaaacctttttattatactttccttctcaacttttttactttttctaaaaaatatagatgccatagcaggagttacaaacagtgctgataagtaagaacacgcaatacatatcattactacctgaggcaaagttcttaagaattctcctgctccaccaggtatatttaaaagtggtgcaaaagcaccaataataatcaatgtagatgtgaatacaggcacaaataattttttaataccatgaaaagcagcttcatctccagacataccttcatcaatacctacctgcacaacatcgcctattacaatggcatcatctactaatattccaagagctataataagtgctgtggtagacatttcctgaactttaataccaagggcattcatagcaacaaatgacatagatatagatatcggaattactgctgatactaccattgcatttctaaatcccattcctattaaaacagttataactaccagaattacaccatctctaaggttctccataaagaaagaaactgattcatctacagccttaggctgaaaagtaacttgatctattttcaaatctggtggtaattgtttttttatctcatctaacttttttgttacatccttacctattaaaactatatttttattatcttgaaaataacctgtaagcaatactgcattttctccattgctagtgaatttaagactagaatcatcatcataacccatataaaccttggctatgtctttaagcctaatagtttgtccagtatcagttgaaacattcaccacagtatcttctatttccttaagagatgtaaaacttccaggtgtctcaactttcatttttccagtttttaaatctaaatttccagaaggtatatctacattttgagcttttaatgctccacatatgtcttcaaaagaaattggatatttatttatcttatttaaatccacttccacttttacctgattatcttgtttaccctttatatcaaatcttgaaataccactaacattgcttagctgcttctttatatcatctgcataatttcccaattgttcatatgtgtaattatcgccagatatacttagaatcataccagcagtttctgtaagattcgtatttatatcactatcctgacatccatctgggagatctgattttaaatcttttatcttatctctcatatcacgccatgctttctctttatcacaatcattagttaagaaaacaacaactattgaagcattatttacagagtaagactcacaataatcataaccatctatttcttcaactttttcttcaactttttttgaaactaaactttctatatcactaggagaacctcctggataaactgttgtgatcattgctgctggagatgaaacatctggcatttcctgcttaggaacaatataatagcaataacatccacttaaaatagctatagttactaaaaataatactatttttttatttctaatagctgctttaatcaatcccataattcatccccctttattctgctgaaacctgatatccagcttttatatttttcataccttcagtaataaggttttctccaacttctaatccctctatgcatacttcattttcatttgtatctcctaaagttacatttttcctaacagcacgtccatcttccactgtataaacataatcttgtccatcattcaaaatgctggtaattggaatccatatgccactcttttctccattatcaatataaactttcacagattggcctacgtaatatttatcattatctattggatttaaaattttgatttctgcactgtaagttccactttgtttatcaggtgcttgaactatattcataatttctccatcagtagtagtgtcatctattttaacttctgcttttgttcctacttgtattttctttacatcatcatctgataaacctgcagtaaccacttgatcatcacttctaactaaaattactggatacccagcttgttgcatttctccttctttacaaaggacatctactacataaccatcttcatctgctacaagagatgcatcttgaactaaattaacctttgaatcataattagcttttgcagcatttacctgtgccaatgctgcttgcttatcctcttcccttgttccattttgaagctgtgtcaatgtttcctttgctgcatttaactggctttcactaccatctaatttaattttaagatcgttaacctgctgctgtgtagctgcctttatttgaaataaattaacggttttatcatataaatccttgcagtaattatactcatcctgagcattttttactgctatctgagctttatttatatcctcggcttgtgctccattcactgccttatcatattgtgcttgtgctgaatccatttgagcttttgcagcattttctgccaaatttaagtcacttttatctaaatcaaccagggtatctccttttttcacctgttgaccttttacaacatatatttttgaaattttagctggacttttaaaggaaagctttcttacttcacttcctcctgttataccatcatattctaaattacttgaatggctttgattttgaagttctactgtttttactggataagtttttgcatctacttttttatcatttttactgcatccacttaatgttgtaaaatttaaaattactaaacaaatagctattatcttcttattcatatatcctcctatattcaccatatcgtacatgaaacatgatatctagtgagtttattttcctgaataatttttattcattgaaaaaatttattagttacttaatatccatggcttttgaatactatctcttaagttattatgaatataaataagttttcttaaagcagtatccaattcttcacttgttataacttgtttatcataatcattttgtagcattaattccatatctacttgagcttttgcaaatttaagtttagtatttgttgaattaacctgttcttttaggttatctattttattttctatatcaagtaatgttgagtaattttgttttaatatatttttaagactcttttttgtatcatctaacttaacgtttgattcatcgtaactgtatttaccatctagataagcttcataattcttaagatctgtataatactttaattctttttgttcatatgatattgatgccaaagcaagcccaccagaatctaatgtagtattaccattagcatcagttgtaacataatcggattgtttaggtgccattggtatatctttattcataatgccttttattccttcgtccttcaaatctttcagatagtccttagttaaatctaatattttatcatcatattcaaaatagctgttaagcttatcagctatatattcttcaactgaaccatctattttaaattttgcataatccacatcataatcaagtatgtaagtattctttaaatctaaatcagttaacactttgaaataatctttagcatcacttaaggaattttcctttgctgttatatcatcttgtaatgattttaattcaacctcagtatcagtaacttgattctctgtcgccattccgagcgacagctttccttttaaataagttaaatcatttttctttaattccaagtttctttttgatttatctatatcaatttgctttaaaaccatatcattatatttattggtaatatcactcgatatttgatcttccatgaaatcccttgattgttttgtctgcttttcctgcaattcaagtttatcgtaaggataatcatatacatcatcagagtagtggatatctgtttctaatgatttattaaaatcagtgcttttttcttgaagatcctccttatttcgataataggttatttgttttgattttaaagcaaatttatcactattatttattgccgcatttattgcatcagttagttttagaactctctcatctatatgcccatgtataccttgtccaatgcttacgttttcccccctattaatatcattttgcgcttgttttgagatattttcactttcggtagatgcagattctgttgcaaatactggtacagtgctactatttataatacttactaaaattccaacagcaatcagattttttatatttcgtctcattaatatccacctctccattattaaaatatttgaatatagtttttatattctacacatgtatacaaactttacaggtgtacaacaaatactatatactgttgtatgagggttatcaagaaacaataaccttaatctatatagttaatctgcacaattacatatgtgtagattatttccttaggaggaacttatgactaataataaaactcttgatttaagaataagaaggacacataaactattatttgatgctttaacacttttactttctgaaaaaagcttcgacaatatcaccattactgacatctgtgagaaggcaatggtccatcgaactacattttataaacattttgaagataaatatcatttgcttgattctttaattagtcaattagtccaaaatttcgaagaaaaaagcactgaacaaactccagttgataatccaaggcaatactatgtaaatttatttagacttctattagaacatatgcaagaaaatataaagatgtattcagtcggcctattaaataatggttccacaataaaagtgcttcaaaaaatagtagttggacgtacaaaatctagattggaaagtgacgaagctaatggactaatatttttaatccctgcgccaattctttcagaattttattcttcttcaatggttagtttagccatttggtggcttgaaaataatatgcctctaagtattgatgaaatggttagatatggagatatgttgattgacaaattggatacaactgataaatagacaggaattctatctgctaaaacaagatcttatttcttaaatgaaacttcatctattgtgcaaggctaaaaaagctcaagttaatttaatctttaaacctataatgtttatccatttaggttcttcaattaaaagaaaatcaatttaacttctaggaagttttagttatggaatatattttacttaaatttgaaattactaaatagtcaaattccaaagcaaaaagtaagcagctcctttatcttattccttttaccctttattaataaaagcgttctagtttactaaaagtgtttaacaccttatagaactagaacgctaattaataacttatgctattattctatatttccgtacttatcttttgcaagctcaataaattcttttaaagcttgagatacataccgatttttttggtatccaatacctaatgttccatgagttttgttgtacttcagatgataaagattaactccagtaattgtactcttatcgaatattaaatctttattattcattagggttttgggataaaaagtaattcccattcctttaactgaaagtgccagcactgtttcaatgctttctgtctccaatataatattaggttttatttctttttcattaaacatttcatctgcaataattctaactctatttttagcattaaccattagaaatgggcaatcttttagtactgtaatatccatatctttttcaagtttttgttttacttccatataattattaggaaaatatttaactaatatattatctggaacaaccataagaacttcttcattacaaagtggaactatctctacattctcaacattaaaaggtaacattcctattattaaatctacatcaccttttaataaagcagcatctagctcctttgaattaccttcaagtaaatgcaaattaatattaggaaacctttcgttataataaggaagaatttctggcaaaaaggctcgtcctcttgtatgtgaagctccaataaacagatctccacgtttgaaatctttaatatctgccaattcttttactgactgctctttcaaatccaaaattcttacggcatttttcactaaacttttccctgctggtgtcaatgttaatggcactgtccgattgaataattcaacccccaaatcattctccaattttgaaatatgagaacttaatgactgttgagaaataaacaatttttttgcggcttttgtaaaattcagctcttctgctgctgttaaaaaatactctaaattaagaaaattcatcataacgtaacactactctaccttgtatttaatataaatctatttcatatcctgtttctattgctaattctacataattacttatcatcaaacgtctttactttcctactatactatctttaactatattagttcatattctagaatattctatctcttaaagcttttttaggaattagcacgtttaattattcttctattttatcatatacttctttttccttgcaatccagagttttccctataaatttatttaattcagtatcctccggtagagatttaaatttataaataaattccttatatattttaaataaacaaatttctgttttagcaattagtctttcactttctagcgcctcgttttaaatatcatctctaagttatattttttgcttaaagattcttatatacttctgctaaatgctttgttaactttgtattttctctataatcaacctgacaatcaataattactggcacatcttgcttaaaggcttcttctaaaattggtattaagtcttctgatttttccactctatatccttttgcatacatactttcggccattttaacaaaatctggatttgtgaattctacatagcagctcttaccgtactgatcctcttgtttccattttattaacccgtaatttctatcgttaaaaattaaaacgacaatcggagtacctatacgaagtgctgtttctatttcctgattattcatcataaaaccgccatcaccaacaattgctaaaactttcttactaggatttattaattttgctgcaattgcacctggaactcctattcccattgttgcaaaaccattagaaattatacaggtgtttggctcatagcaattataatgccttgcaatccacatcttatgcgcaccaacatctgaaaccacaatatcatggggtcccattacttttctaacatcacttaagattttctgaggtttcattggaaaactttcatcttctgcatagatttgatgttcattaaccattttttctttgatttttagtgcatcaactggctcttcttttctagatgttcttctcattatattatataaagcatctgaaatatcaccaactacttcaactattggctggtaaagcttattgatgtgtgatggtctggtgtcgacatgaacaatcttagtatctccatttacattccattttgctggtgcatattctacaatatcataaccaattgtaactactaaatcggcatcctcaataactttatttacataatctttctgtggaattcctattgtccacattgaatataaattatcaaaaggaattattccttttgccatcatagtatttattactggaatttttaaattacttgcgaattctgtaactgcttttgcagcattattccgaatagctccacttccagctaatataactggattttttgctttaaatatctcacttgcagcttcttctattgatgctaaggctgcatattcttttggtggaattttcttttctaatggtttttcacaaatacttacaggcatctttgaaatatttacaggtaaatcgatatgacaggctccaggtttttcgctttcagcatacttgaaagcgattcttacaatttcatttactgtatctggtctaacaatttgcttacttctcttagtaattggttcaaacattttacaaagatctaaaaattgatgcgatgttatatgcattctttcagttccaacctgtccagtaattgcaactacaggggcaccatcgctatgtgcatctgctactcctgttactaaattggttgcccctggaccaagtgttgataagcatactcctgctttacctgttaaccgtccatataaatcagccataaatgcagccccttgttcatgacgagtcgtaataaacttaatacttgacccttcaatagcattcattacttctaagttttcctctcctggaattccaaaaatatattctactccttctgcttccaagcatttaactaacagctgtgctgtatttaattgaactttttcatttttttctgtccccatagtaaacatcctctaatctatatattttagtattatgcttaatgcattaatattttctcaaacatcatacttcaattaaaaatgtttttccaacagcttttttcctatttaattacaataaaatggttgtgattaaatgaggaaaatcaaataatttatttaacaactgtttagttgtagttctacaataaaaaatttgtttgaatgatgtttagaataatgataaaatgattttggtaaatatatttaattttaaataaattcttgaaaaaattttattttttatgtaaaattataattaaatagtaagacaatggagtcatttattaaaatggctctttttttatatttattctttttaacttacagatgttaataaaaaacttaatataagaattattttaagggggaatagcttattaatccctccagatggcaatccaattattcttttagccgataggcgacagcttgaggatatccgaagatcgctcatgttgaatctgtggatatacaaaaaatagttcagctgaaacctaacgctaaaattacatttaagaaaatcacattaaaaaaagatgaaaaactatatttaaatagaaaaaggcagattactttgccatcagcatcgtaatctacctttaatttattttactttaattagattaatccattcttttgtagaaattctacagcaacatctttaggatctttttttaattcatctacttcatagtttaattcgctcattacatcattattaagtaaatctcctacttcctctacaagcggttgtatttcaggatatttctttaatgtctcagctcgtacaactggaaccgcataatatggagggaagaagtttttatcatcttttaaaacacttaaatcatatttttttaataatccatctgttgaaaatgcatctataacatcactttctttattcattaatgccgcatacctaggactaccatctatgcctacagtattcttaaaattcaaattatattttttagctaaacctactaatccatcttctctattaagaaattctaaggttgtagttgcagtaatgtcacttgaaactttagataggtcacttattgttttaagattatattttttagcagtttctttcgttacggcaagtgtataggtattattaaatcccatttgctttaatacttctatattatacttatctttaaaatctttttttactgtattataaacttcttctacatctgatattggtttatactttaattcatctccataggctgtacccgtataatctacagacatatcaacatctccattttgcatagctgaaaatataacctgagtaccacctaatgcaaatttacgattaactgaaatatctgtttttctttcgataagctctgataatatatttcctaaaatctcttgttcagtaaagtccttgcttccaattgtaataacttttttattagaaatctttttagataatccacttactgcaaaaatcccaataagtacacatgcagtggctgctaatatacacttttgtatttttctagctcttatttttgcttctttggatttattattagctttttgtaaactgattggcgtaacaagtttttctacaatactaaataatccatctaccaataaggctaatatacatgctgggattgctcctgctaaaatttgataattgttaacagttcttataccagaaaagactaaatatcctagaccaccgccaccaatgaaggctgccatggtcataagtcctacagctgtaactgctgaaattcttattcctgacattattacaggcagcgctaatggaatttgaaccttaactaaaacttgaaatttagtaagtcctattcccttagaggcctctagcatatctggattaatattatcaattcctgttgttgtattttttattattggcaataatgagtatagtaccaccattacaattgctggtggtgtacctatccctaaaaacggtattgcaaatcctagtaacgccatacttggaattgcttgtacaacactagctattcctaagattggcttgtttagctttttcacatagcttgtaagaattcctaagggcataccaattattattgctatcccaactgataatgctgtaagcttaatgtgttcaagcagtaatgtaattatctgatcttttgatgtaaatatataatttaaaaattcgttcatactaattcacctcttccatatctaaaaactgactgcttagagttgttaccaagctacttttggtaattataccttttaaaactccaaagtcatcaagaacaggtacttgtcctattttatgttcctttacaagttcaagaatgtctataattgaatcatcaggctgtacgcttataaatctactgttcattatctcttctacaggaatatttctatcagttttattttgaatctgctttgctgtaataattcctaaaagataactttctctatctataaccattaaactatcaacttttgaacttctcattttttcaatacatcttaaaagtgatgcatttttaaaacaaacaacaggatggtcaatcattatatccttagctcttataaattctggtgaagaccatattctattcttccctataaattcacttacaaaatcgtttataggatttttaagtatattttcaggcgtatcatattgcacaatctcacctttattcattatacaaatcttatctgctatttttattgcttcatccatatcatgagttacaaaaacaatagttctttttaatttactttgtaaatcaattaactcttcttgaagctgaactctagtgattgggtccaaagcactaaaaggctcgtccattaaaattatttctggattagtagcaaaggctcttgcaactcctactctctgctgctgcccaccactaagttctgttggatatctatctaaaaagtcattgctatttaatccaaccatatccataagttcaagagttcttttttctatacttgccttgtttaacttttcaactttaggaatcatctcaatattttctctaattgtaagatgcggaaacaatcctgtctgctgtattacatatccaatatttcgtctaagctttatcacatcttttgatgcaatatcttctccattaatgaaaatcttacctgacgttggcttaattaatctatttatcatttttaaggttgtggtctttccacatccacttgatcctataatagcaacaagctctcctctatttatctttagtgtaatatccttgagtattgttttgtttttaaaatctttgcgaatatttttaaattctatcaaaaattccactccctttctgttaacaactttatatctatgtacaagttgttactttttatagttttagtaacaacttaattgtaatataaggttgttacttttgtcaaatttgaacttttttactttttgtgttatagagcttcacgttgaaaatctgagatactacaaagagcgaaattagataaatattgataaactcttgaatcataacattcaataagcattggaagtgagctgttatatatttaattttgatttggattaagatttttcacgctaaaattataacgggtaatatattaaccatttttataatctaaatggttaatatattacccgttacaaattaattcagagatatattatggatataagaatttatttactctctcatagcagctttcatcaccgacaaaataaaagatatcattatcacgtaacacagcatatggtcctggtgacatttctaggcatccatttcttttgatacatacaattgttgcagaggtattgtgccaaaaattaatttcagctacatttttatctatgtatggggtttccttagttatacgtatttcaaatggtatgaatggatttatggacttaaatctatcagtcctatctaacaaatcaattatttgttctcttaataaatcattttcttttttctgctcttctaatttatctaatatatcatttcttaaatcattaactgtcttaacatcattatactgcttgataaactttatggcattttcagttgattttattattacaccactgcccttattggcatctacaatatcaacatccgcaagtattgctatagctcttctagccgtttctgctgaaactccatattgacttgcaagtacagaacgcgcatatattttttcaccaacttgataatgtccacttgctattttcgaagcaatatctgtggcaatctgctgataaacaggactaactattcttatttttttttccatcttttcttctatcctcttattaaaattagatttaaatacctttgaaaatattacggaatactttcaaaggtattttatcatatatttttattttctgctattcttcttaatttatcataacctaacttcatataatttataaaatactgagaatcaaaaccttataaattaaagcctaaataaataacaaaaaattttcaaaactacattattaagttttatttaaaagtcctaaattcatacccttggctctttaaataatctattactcctggtaatgctttagctgtttcttctttaccatatgtgtcatgcattaatagtactacttttgtcttgtttccaacagtcttcttaacctcttctgttaattgatctgcatttttatgaggaccttctgcatcttttgataatgcattccaatctacataatgataatctttttccttcattattttatctacttctccagtatttttccaagacatatgtccccctggaaatctaatagcccttgtagaaaaatcttctcctaacactttctttaaagactcattagttttattaatctccgacatgaagttatttgtgttgacacttccattaggatataagtacttgtaattatgtgaatacgaatgatttcctatagcatgtccttcttcaacttcctgctttaacaaatttttattagcttcactttgatctattgcttttccaagaacaaaaaaagttgcttttacattttcgtccttaagagtctttaatattgatggagtattagtttcagatggtccgtcatcaaaagataagtaaacgacttttttaccatcagtatcttcaattttctgccctttcgcttgttgagttaaaaatttctctacagatgcaacatcatcaacattagaatcactttgtacttcagcgtttgtatcatcttctttggttttattagctccatcatcttgctttgacacaacagcctcattagatgcaagtgcttgtacatttttatcctttgaaaaaaatttatcatctattatagatgtagccaaacctcctaatgccacaattataatagttaaaattaatattctctttcttcgtatgcgaacatttctgttatatctgctatatctgtaattgtttctcatttccttatcccctcgtatttcttagtatatttattgcaaaaataattcttcatcataattctaaaaatatcacaaaaattttagctgtaattataagctatgaactgtgcattgtgaattgcaacatatataatatctttccataattatcatttaactactaaaaattatacctcattatatgagaaaattgtatcatataacaataatcgccaaatttttttatttcgtgcaaaaaccaacacttcaataactcatatcaatattttaatttaaaatacttaattatttgtaacaaaaatattacaatttattaacttggttatttgccgtaatatattgcaagaattttaacagtaattgtgaaatatgtattgtaaatttcaccatatagatattcaaaacaaagcttagacttgtgcaataacttaccgagaggaaaggtactctgttgtttcggttactgagaatatgctgaggctttctaacatcataagttgcaccatttcagcatgttcccgagcaagctcgtgacaagcaaaacaggaacaaatttgtatctaatttctagtataatttacaaagattaaagtgtagggatatctatatattactaaaataagaaaaaaagctggaataaactattattttttagattattccaaccagaaatgagtaatatacttttgtggaatgtttcattggtaattttgatggatgtgattctttggctataagttgttctaaatgtgctagttcatagcttgttctttgaggctagcactttgggtgcaactttatagccttagaatcacccatcataattacctagaaactggaacaaaagtatgttattcatttcggtgagtatacgcataagtatagattgtagttgggttatttataattcaaagtaccgctactactattagttactgctaagtacccaaggtttttcaatactattttttaatatattataagtattgataagattcattagtgaattatctaaatccttactctttaaaagttcagctttaaagtcattttcagttattattcctaaatctacttttgcttttagagatctaagctttgtattattagatataatctgttcatttaatctttttatttgattttccaagtcacacaatgttgaataattctcttttaagacatttttaagacttttctttgaatcatctaatttaaccttagcttccgctaaactgtatctaccttctaaataggactgataattattaaatgcatttaagtattgctgcacatagctaacaatggctaaacaatattcctgagtattaaaagttttgttgccatcgccatcaatctcgtaataatcatttttattaatcttcactactttattttcatagtaactaagtttattcatatcctcttctcgtagctcatgcatataatcatcagtaagtttaataatttcatcattatactttaaataactatctattttatcatctaaatattcatctagcgagacatctatttttaatgttttataactaatacttgagtccaatgtataatctgataaatttagatttgttaatactcctaaataatctaaattattttttaatgagttttctttagcctttatctcatcttgtgccttattcagttcaatctgcttatcctccaactgattaggaatcgcaagccctactgaaacttttatttttaaagcatctaaatcattatttttgatttctaagcctgttttcaatttgtctatatcaatcttttttaagatgattgcattatacctctttgtaacatcatttgttatttgatcatgcaaaaaagcctcagactgagccgtttgtttcttttgaagtttaagcttatcagatggaaagtcatctactgtatcattgccggtctttaaattgttatcatccgagaaatcatctttttcatcctgaaggtccaacttatcatcatacagtttcaattctttttctttcaaagctaacttatcactattatcaacagcacattttataagctgatctaaagtgattactttctttgttttagtaatttgttcatctaaagtatttgtattttcacctgatgtacttgaatttaatacaatagaattacttttatctgtcaccgctttcgtattttcagctgcaaaagtaggaataatcgctccattaatcatgctaactgtaatcccagccgcaattactttatttatcttcttattcattattattcacccacttaattaataatttgatttgttactctttcatatttcttgtactcaattttttcatgtctatagcttgcctataagcactcattaatgagttaaatatttaaaattagaaatatccaaaccagataaatttgatacacataagtttacttctcattgaataacactatagggttccatattgataacaatacatatcaactgtttcaatttaccgaataacagcgatattacaatttcataagtttgaatatcattgacgaactccatatatagatacactatttaagaatttgatttattagatgaacatatttacaaagttgctaaaactttaagcttatatcttcactagaaatcataaatatatttgtgaagaaaacatttgaaaatgagctgttaaaagctcttaattgtaggttgttcaactaatgcttgtcacaatgaaattgggagcaagcattagtagtgcaacctacaatttagtactttcagcgaaattttcatagccctgtgaaataacaatgtttttactttcggcaggttattgcataagtctaagttatatattgtttatctatatatagataagccaattataagttagatttatactatgaaatatatcccaactagaaatgggtaatatacttttgttgaatgtttcattggtaattttgatggatgtgattctttggctataagttgttccaaatgtgctagttcaaagcttgttctgtgaggccagcattttggtgcaactttatagccttagaatcacccatcaaaattacctggaaactggaataaaagtatattattcatttcggcgagttatatgcataagttcaggtcttagttggggtatctatatttaatacaaattattcattctcgccttcattaataatttcctcctcctgtatttctacttctttactgtctagaataattttattttcaggctttttgtctactttgtaccaagaagcataaataactggaagtacaaacaatgttaggatagttgcgacaaatagtcctccactcattgccactgccatagggccccagaaagtatttttaattaatggtaacatccctaaaattgcagctacagcggttaagataattggcctaaatcttaagatagttgaatctataatagcttcacggatagattctccagtcttaatatgatttgcaatttgatcaactaagatgacagaatttcttatgattatacccattagtgctaaaatacctaacactacgacaaaccccattggactgttaagcataagtaaagctaatgttactccaattattccaagtggtgctgtaagtaaggtcattatcatctttggcacgttttggagttgaagcatcaaaagaattaccattaaaactatcataataggaacaacatctctaacctgagctaatcctttattgcttctttcaagagctccacccatatctatgctgtatcctgaagggagggtctttcgtaaatcttcaagctgattgtatatatttgtttctgcatcatttcctgttatgcctggtaatacttctgcttgaactgttatagtgggtttcaaatctcttcttactatatagccatcttcagcatcataatttattttagcaatttgatccattggtataaaaccgccgcttggtattggaatatttatattctttatataaccaagatcattaatattaactgaatccattttaactactatatctacagtcttatcatcttgtctaaattgagatactgtagtgccggacaattgtccttgcaagaatagtgaaatttgttgactgtctaaaccaagtgccctagctttatcctggtccacttcaatagacattgcttttgttttttcaaaccagtcgaaattaatattgtataatttctgattagaggccatggcatctcgtacttttcctgcaatttcacgtactttgtcattatcataacctgtaactctaaacatgacaggataattactaggaggaccattttgaataacctttatgtgactttgaacattttcaaacccactatcaagcaattgctgaacattcttatttaccctttctcttgctgcaatatctttcgtcaatataacaaattgtgcaacattgctattctgcgatgcaggctctaaagataaaacaaatcgtggagcacctctcccaacataataagaataattaacgatgtctttatttccttttaaagcttctgatagattatctgcagcttcttgagttgcactaattgatgaaccctgaggtaaagtcatatctactaaaagttcaggccttgttgccgctgggaagaactctttttgaacataatgtgaaagtgcataaccagaagtacaaaacaatattactgttgttgttattactaattttctatgatttaagcaccaatttaaaacgccacgaaatttattataaaacttggtgtcatatacatcagattttttattttcattatttttaatctttattaaatcaaaacctaatactggaacaaagcaaactgaaacaacccatgagaaaagcaatgatattgtaactacagtaaacacgcttccagtatattcagatgcacttcccttagaaaagcctattggtgtaaaagcagaacaggtgatcaatgtacctgtaagcataggaaaagctgttgatgtaaaggcgaaacaccctgctctaaacctatcccatccttcctcaagtttaactgacatcatttcaattgctataattgcatcatcaactagtagtcctagtgcaattatcaaagctccaagtgatactttgtgaagcggaatccccaaaaagtacattccaacaaacactcctgcaataaccaatggaattgatattgcaactactaatcccgtcctgaaacctaagcttacaaaacttactaccattacgataacaagagctaaaacaaaagtttctaagaaatcattaatagaatctgtaacagcctcaggctgattagccacctgatctatatttaaaccaagaggtaaatcgtttttaatctcatctagtgttttatctaaattttcacctaagtttagaacatttcctcccttttccatagaaactgcaattcctattgattcctttccattaaaaaacattttaggatccggaggatcagaataacctcgtgtaatacttgctatatctcctaaacgaaaggtttgattacccgctttaattggtaagtttgagatattgtcaacattatcaaacattccacttactctaagatacacattatctgtcgatgtctgaatcattccagatggtataacagaattctgtgtctgtagagcactgctgattgtattcggactgatgccaagctgcgccattttagtattttctatttgaatagatattttttctgtttgaacaccaattaagtcaacttttttaacatcttttacatttagcaaagtccttcggatattttctgctttttctctcatttcctcatacgtatagccatcagatgttaatgcataaacacagccatacacatcatcatatctatcattaaaattaggaccaactatattggatggcaaagtacctttcatatcattaatatcattacgaacttcaacccaagtgtctctaattttatctgaagccacgtcatcttttaaatcaatgaaaataactgatcttccaggaaaggaataactttttatataatccttattaggtatatcttgaagtcttctctctattttatctgtaacctgctcttcaacctgacttgcagttgaacctggccaaacgacagttatgtacatctcacgaatagtaaattcaggatcttcatttcttccaagtttgggataaacaaaaatcccagacacaattattgtaatagctaaaaaataaaccagttgttttctattaagacaccactctgtcagattgaaacccttcattatttatcactccctactcttacgtcctgaccttcgcgtagtttggtaatgccagctgtcaccactacatctccttcgcttaagccatcacttactgtaacctgatcactaccgaaatcctttactgtaatattttttagggtaactgcattatctttaacaacccaaacagcaggagatgaatctggctgatatacggctccaagtggtatccatatttgacttgatgagttattttcgttaatagacacactagaagacattcctatttttatgctaggaggtggatctataagatttattctaactctgtaagtacgtgatgcatcattagctactggagaaatttctcctaaagagcctttcaatttaacatctgataaagccgaaaagcttatattgatttctttagcactttttaattggtcaattctattttcaggaacgttaatttctacttctaattgattattctgaactagtgttataatcttctgcccaggtgtgacaacttgtccttcttcagcgtcaacactgctaattactccagatttatcagcacataatttacaataatccagttgattcaaactttgagtatgcaatgcattggcctgttctaatgcatcctttgctgtttcatcagcatttacataattatcatattctgcctgagatataaatttagattgataaagtggctcatatcgtttcaaattatcttcagccagtttatatttggcttctgctagtgaaactgccgcttcagaattttttactgcttgttcaatatctctagaatcaagttccattagaactgctccttgttctacattatctccaactgacacattttttttaataatctttcctcctacttggaatgccagttgacttttataatgaggttggactactcctgaataaacatattctgaatccttattggatgttgagatcgttagagtttttaccataggaggtggcaaaactgtttcctctttctttgaatttgttttcactatcttaaaaacaaaaaaacaaatagccactattccaataaccagtaaaaacttttttatcatcttaattttcattgtaaagcaccccttttaaattttcttgattgcatcttcaatctttcaatcaaattacatctttaatcacacaacacggtgttgtataattaaattataactgatatgaaactttcatcaatcaacaaaagatacccaagtgttggaaagaaggagataatatgaataaacaacctgaaattaccgaacaaacaaaaagaaatattatagaggcgttttggaagattttaaaaaagaaaagattagataagataacagtaaaagaaatagccgacgtagccggctataatcgaagtacattctatgcttatttcacaagtgtaagtgatatacttgaacaagaagaaaatattttacttcattatatacatgataatgcgagcaaaatattgtttcctcacttaattaaaggtttaagacctaaagcttctgatctatatttctttgctaaaagtgaacatttgaaaattttgctcagtgaaaatggcgatcctaagtttaaaggaaaactaaaaaagacaattattccaattgcctttaatgcatttaacttacctaaggataatatttacgctgaatatctttgtgaattttgtttttctgcagtaatatcaaccataatccattggtatgacaatcaagaaataagaatagatgaattattcgatatactttggacaatggttacaaagggcgtactacttgaatataaaaaattaatataacgcagacatacttagctaaaacattatacttaataaactatgcataatttcttctacttctaaagaaactatgcacagttttcactttacattgatcattcctattcttaaacatagagtgttaaaattgtagccaaaattaaaactcttcaacaatattaaagcatttttttatatcacgctctccttttgctaccacatcacttagcagccaggtattttcctctgctttttgaaacttccaatattgttcaaactccttaactttattatttccaaagagaatctctccatctgtttcatctacaacataatcctttgcattatatttaatgacgaaccagactatatctttatagctatcatgatgatgaataagtccaactggctctgcttctataaattcaagttcttcaattatccttccaatattctcaaaagagtatcttttacattgtgattgcagcccatcataaaactcggtactcatatatttttggcacatttcaaaattcatgcgttccaatgactcaattaccttagaaaatgcttcttttacagtgcttctaagaaaagcataagaaatatttttaggatctttctttattgtatttataaattcatttgttttcttctttttcttattcatctcgttattgtatataagattattaatgcaataatcatccagctttaaaatatgaataataattattacaaaacttagaccaactaaaaaagcagattttattggaaattctcctccattatgataccacttaataatatcaggcaatcctaacttatttaaaagtgctattaacgtaatcatcacaataagaattttagtcttaaaaaagaatagatccgtcatagcttctctatcatatctattacgcttatcagtagccatatttaaataatacaaagtctcagagtcatttaacatctgaactatcttcttaacatatttactgcgcttatttggctctttaaatatttcccacatattattccccctgaatatatataagtttataaattccaaaatactatcttcattaaggaacttcttattaaaataaaattcattttttattagcttctaaaaatgctgcttcagctgttttttatcctcaaaatataataaattcatatagttttgttattggggacaacccaatataaatactagacaaagctcatccattttttcttccaaattcacatttgtgtaagcacattatcgtattctcaattacactattttcatataataattataatattaattcaaatattatgtatatagctaaacaaatatagggtatattcatttaaaatctattattttttataacctcaagatactacatttcataaagcaatgtggttcttgtttaatataaattattatattgttaaatttctttatttgtaacttcttaactttttaatttttttcattgttaaaaagttttattggaaaaagaaaatatcctacattatcaagttacatataaagatacttgtaactggtaaacttaaatgttataattcatatataagttacatattttatattttgtaactcacaacttttaactatgataacatatttatagataattgcgaaactcattgataaaaatgaataatgattgatttgaagttgcaaaaacattattaatggatttaatggttcctgctatacaaatataatagttgacttcttaaaaaagggcgcacgaaataaagcgaaggtgaattccaatttttataaataaattttatgcaattaatggctttaagcttcggatatatttatgtttatgaattttatctgccacgataactgttattagttgagttattccggctagaagtaaatcagcatgaagtgtttgctcattttgagtcttacgctccgcgacgcagtaactatatttgaagtgatttatatttttttcaacagctactctgattttataagtattactccattcttgggttcctcgtgttattccaggatatgcgcgcagattcttttcaggataaatataaaacattcgtccacataaggaatttgtacatggattttcacattgagttacacgtttgctctttttggtttctttgttatataaccatttcattttagggcatacaaacttcattgttggaattctagaacgaagatgacttttactaccttcacgtttcattggaatagaaggatcattcggacagcatggaatgccgtcttcgtttaaagggcaatcagcattttctagtgtaagcctagtttttaaaggaatatatgctttatcaaattttaattcgagaagaagatcacgataaatttgaatactgtcaaaagcagcatctcctaaaaaggtttttggacttattaatggatgcttgttaaaaaaatctttgagaacagggataagagccttagaatctgcaagagatttatcttcatcaggtgaatcagattttttctcaacaataatatcaggatgagcattgagaaaatctttattatagaacgaaatatctcttacgataccgaggccattagtaatgattccgaatttaaaagcatagcaaaaatgcccattaatatacatttgttggatggcagggttggctgaagcgtgtgatggcatagagccataggcagctttataaggatcataagagtcatctaaattgcatgctttcttaaaatttttaagctgttttataatgcgattagcatatttaggattattttcagtgacaaatgcttcaaggcctgaagtatcaaaaatagtcatggaagcaagagccgtatcaatctgttggcatatcggttcagtaatatcaacaagattatcgaacatggattgtaagtccaaaagaaagtcctgcttgaaacgagtaaacttagatgaatcaggaactcttaaaaagccgcagaagtctcttagttcttgagaatatttaaggaaaataattaaaagagaatctgtaggaatagaaaaaatgcgttgtaaaattaaagcactgatcatagcataaagctgatattttcgcggccttcctgtggaagcgtaaaaatggttaatgaaagatgcaggaactaactcatcaaggtcgatagtgttttcgagtaaagaaagaaattggaatttatcattttcaaatttttctttgcaatcagaataaacatctgccaaagaaagctgtttatatgttatcatatatatgactcctttctgaggtatatggtagttttgtttttaggcaattcaattttaccataaatcagtgaggagttattttattttgctaaaaaaatatcccgcatttctgcgggttgcggcgtttcgcaaacgcctataacatatttaacttgaaaggtggaatttaacatgcgtatttttgttacaggtgctacaggatttataggatctaaaatcgttaaagaattacttgatgcaggacataatgtaataggacttgctaggtcagatgcatcagctgcatcacttactgctattggagctaccgcccatcatggctctttggaggatcttgacagtcttcgcagtggtgcttctttatcagacggagtaattcatgcagcctttgatcatgataattttattactaattttgaagcttgctgcgaaactgatcgtaatgctattgaggccctaggttctgcacttgcaggaactaataagccattagtaattacatttggaaccacaggcatcaagattggtgatgtcgtaactgaaaatgataaagctagcaacagtttaactgcaggacctagagcggcttcagaagcattggcactttcactagcatctaaaggtgtacgtgtgtcagtagttcgtcctgcaccaatagtatatggtgatggtgaaaaatatggcttggttactatgcttattgaaatggctcgcagtaaaggcttctctgcttatgtaggtgatgggtttaaccgctggccagctgttcacagacttgatgctgcaaaactttatagactagcactagaaaaagcatcaaccggatcaatatttcatgcagtagctaacgaaggtgtgcctatgcgcgaaattgcagaagctatcggccgtcgtcttagtgtaccaaccaaatcaatatctctaaaagaggcaactaaccattttggagctctaggacagcttattgctgcagatattccagcatccaatgctttaactcaagaaaaacttggatggaagccagaacatttaggactaattaaggccattgatagagcttagttctttatatcttttttaaatatactatcaactaaagataaaataaagagccaagcaaaaacaatctttaaaattgttttttgcctggctcttaaataatttatttcatttttatctaattcttattcaaatacagccgctacatcgtttaagcattttgtaatttctatatgttgtggacaatgtccttcacattgcttgcatcctatgcaatcagaagcctttccatgctcttgagttaagttattatagtagacctgtgaaatcccaggaccaaattgtttatagttattaaatagggagaaatattttggtatttgaatattttttggacatccatctacgcaatactgacatgcagtacatggaactgcaatactgctattgataatatctgtagccttttttataatttctttttcttcatcatttaaaggcacaaaatcctgcatgtaacctgtgttatcaagaagctgttccatatttgacataccacttaataccatcattattccttcataacttgctacaaatcttattgcccatgatggcacagacatatctttatggtattccttaaacaatttctctgcttcttctggtacatttgcaagagttccgcctttaattggttccataacaacaacttgcttattatgttttcttgcaacttcatagcattttctagattgaatactttcattgtcccaatcaatataattaatttgtaattgaacaaaatctacttctggatgagcagttaagatttcatctaataaatctgcattatcatgaaaagaaaagcccatattttttacttttccttcttccttctttttctgaacaaatgcaaagctatcgaacttttgagcatttttataatttgatacacctaagttgtgaaggagataatagtcaaaataatcaacaccgcatttttctaattgctcgtcaaaaattctttcttgatctccctcttttttcaaaaacatagttggtagttttgatgctactgtaaaactatctctcttatgacgttttactaaagattctctcaaagcaatttcactcttaaatgcatgatacatatacgctgtatcaaaataagtaaagcccctttccaaaaaagtatctaccattttatttaatatttcaaaatcgatactttcttgattttcttgatcttttagcggaagacgcataaatccaaatcctaattttttcttttccatctcttcgtttctccttaactcttttaaaatagtaaattaaattgtaattttcatgccctcattcataaattgaattaaatatttaagtaattcttattacaaactaaattctactactttgagtggactctaagtcaagtattttttcactctccccctaaaatgaaaaagtaacttcttgattgcaatactaatttcattttacgcgaagttggcgttgaattttacggactttcaagaatcaaagcctacttatttacttaacgttttatttagaattatattccttcacgcttattaagtattattcaccccaactatttttgcatatcttatatatttcatatattgcttcatcagtatacttttcaaaaacatgttgattccaatcccatctactattttgcactctataatttccacaacaacttattttaggatgctccattacatttaaattcgggtccgttcctttaactaaagaaattaaatcttttttatctaaatcaagcttcaaatccatatctcctttgatttcattacttaattatattcctaataaattattatattcacttatcttttagtatcattttttatactatgttacagaaaagtgcgctcttatataaactggttaattatgttataaatatattatagaaatatcaatttaactttctccgcaaggaataaaatatatgaattaagggggacctttaaaatgacaagacaatctttattaataaaacgttatgataagttaagcacaaaggtaattgaggctttgaaaaagcgtcattttgatgctttttattgcaagactaaggacgaagcagttcagcaaattttggatttgattccagaaaaccatgttgtgtcttggggtggctctgaaaccttaactgaaattggcataaaagaacttgttaaaaaaaaatgctatcaagttatagatagagatactggaaagagtcctgaagaacgaacagaacttatgagaaaagcacttttatgtgatacatttttaatgagcagcaatgctataagcgaagacggtcagctatttaatatcgatggaaatgggaatcgtgtagcagccatgatttttggacctaaaagcgtcatagttgtagctggaatgaataaagttgtgaaaactcttgatgatgcaattcaaagagctagaacaattgctgcaccatcaaatatgcagcattttcaagatatgaagactccatgctatataaatggcagctgtggagactgtctaagcccagattgtatttgttcgcaaatggtaacaacaagaactagcaggcccgcaaaaaagataaaggttatactaattggagaagaccttggcttttaagcgaacgtatgtaagtcgagtttccttttaaaatttctctagagatcaataaatatgtttgcttggaatggctataaaaatatcgctgaagatagtgaactcacggttgtggtcacttaaacatgctcccgccttgggtgtgacaagtcaaagtgtaacaaccataagctaaatatctttagcagctcatttttaaattccattctccatattatgacccttgtggctacaaaaatatttattcgttacgattatagataattgttttgttaaagaaattattaactatgttacaattttttatgcatacggaaatcgataatgttttccaattattctgtggtcgtacttcgaactatatgtatattttagtctgtattttaaattagtgttgaaagtttacagttagcttatctatataaaggcataaaaaataacaagttccctacaattgtagaaaacttgttatctttatatagtttatttaaataggtttaattcacaatccgaaaatagtaaatcagtatgcaggtgatttattattttctcatgtgcctaatgtgagggcattttaattagtctttttcatatagtttatttaaataggtttaattcacaatctgaaaataataaatcagtatgcaggttgatttattattttctcatgtgcctaatgtgagggcattttaattagtctttttcatatagtttatttaaataggtttaattcacaatctgaaaataataaatcagtatgcaggttgatttattattttctcatgtgcctaatgtgagggcattttaactagttttttatgatattatctaagcatccatcctgaaagtaccatcatttgaacttctgatgttccttcatagatttctgttatcttagcatcacgcatcattctttcaattggataatcacttgtgtatccataaccaccaaataattgtaaacaacgatttgttacatctgtagcatttctagcagcaaataattttgccatagcagctaaatgtgtgaatttttgatgatcatcttttgcacatgcagcttgatatactaaaagttttgcagcttctgtatttgcacgcatttgagcaagttcaaattgtgtattttggaattgagcaatagattttccaaattgaacacgttctttaacatattttacagtttcttctattgcaccttctgcaataccaagagcttgtgcagcgataccaatacggcctccatcaagagttgccattgcaataccaaatccttttccttcttctcctaaaagattttcctttggaactatacagttatcaaagaataattcacatgtagaagatgcacgaattcccatctttaattcatggcttccaactgaaaatcctgggaagtctttttcaacgataaatgctgaaataccttttgttcctttactcttatctgtcatagcaaatacaatatatgtgtctgcatatcctgcattagtaatgaagattttgcttccatttaatatataattgtctccatctaatactgctgttgtcttttgcattgaagcatcagttccagctactggttcagttaatccaaaggcacctaatttttcacctgaagcaagtggttttaaatatttttctttttgagcatctgtaccaaatgtgtaaattggtgttgcacaaaggcttgtatgtgctgaaactataacacctgttgttccacaacatttagataattcttctacacattgtatataacttaatgtgtccattccagctccgccgtattcttcaggaaatggaattccaagcaagcccatttcagccatttttgctacattttcttctggaaatcgcatactttcatcgatttcttttgcaattggttttacctcattttctgcaaattcacgatacatttctagtaattgttggtgattttcatcttgtttaaaatccattttaatttcctacctttctttttttcatcttttccttttttatttcatgggatgttaatatatatataaattttttaattatgagcttaattttctatcggacaacataccttacctggattcataatggaatttggatcgaatacttccttaatacctttcattaattccatatttatttctccaacgctatcagctaaataagccatctttccactaccaattccatgttcgcctgaaacaagtccaccgcatttgattgcttcttcgtaaataatcttaaagaatttgtcaactcttgtcttgaattcttcttcttctaaatcgttactacattggtatatgtgaagatttccatctcctgcatgtccaaaactcttaatagttaatccacactcttcaccagttttatttacaaaagcaagataaggagcgattttatttactggaactacaacatcacattcatctaataattttgtttctgccataatagcttctaagaaacttgaacgcgctgcccatgcatcctttatttttgcaggtgtatcagctacaagaacatcaattgctcctgcttctaatactatttcacttgcttgctcaataagattatttaattcatcttcattacctgcatctatagtaacgagtaaataagcatttgcagtaactccatcaattacttgtgggaatacactctttccaatatatctttcactagataaaacaatttctctttccatgaattctatcgcttgtggattcatgtgttccattctaaattttggaacagtagaaatacaatcatctaaattttcaaaaggaataattaaacttgctactacctttggcgctggcattactttcaatgttagttctgtaataattccaagtgtaccttctgaaccaatcattagatttaaaaggctataacctgagcttgtttttgatactgtagcaccaaatttagtaatttctcctgttggaagaacaactgtcattgcacgtacataatcacgtgtcgcaccgtatttaacggctctcattccaccagcatttgttgcaacatttccaccgaggcatgcaaatttttcacctggatctggagcatataataatccttgttttaaacaatcctctgcaaggtcattcaatagaactccagcttctacattaacaacaaagttttctaaatcataagaaattattttgttcatttttgtaatatcgattaaaactcctccaagtagtggaactgctccacctgtaagtcctgttcctgctcctcttggagttactggtattttattttcattacatatttttaccactgcagcaacttcttctgtagaatgtgccataaacacaacttgtggagctacttttccgtagataggcatttcatcgtgactatagtcatcgtttatatcagctcctgttaaaatatgccctggtgctgcctcctgtaattttgagattatctcctctgtcaattgattatactcagccataatattcattcctttctaagatattagatgtaaaattcactttatctttctttagcaaattactacgccgaactaattcagtttacattttataccctaagggtataaaatgtaggcttttgaataaagttctttaattttctaaaaactactgaattttcctggtaaactttaaacggtcacctgtaatatatatcaactgccttaaagtgttccaacaaaacatactattccagctataactacataacacacaaagtatttaaatacgctttttaaaattttactttccgaacctgattgattaattgcacttgcaccaattgcaatactttgagggcaaatcatctttcctatacctgctccaagagtatttgctgctgccatccatgcaccagaaagtccaagattttgtgcggtttgtacttgtaatcctccaaataaaacactggttgatgtacctgatccagttacaaatcctccaattgctccaattaatggagaaattaatgggtatgctcctccagttactacaactaaaagacttgcaatatctgaaatcattccactataccccattacctttgctgttgacataactgcacaaattgtaacgattgttttccagtttgcttttaatgtgctacgcagtacatcaagtattgttgatatttttgcgccttgaacgagaccgccaatgactgctgcaacaagaatgataacacctggtgtattaatccagctgaaagttagagtatttccacctttaccagcatatacgcttgtactagttttaaatactgcaattgcatcatgaactggtgcacataatgttgatgtagccattaacattacgaatattaagataaatggacaccatgcttgtactgctttaccaaatgataaagctgtttcttcttttttcttgttaatttgaatgcaatactcgtcttgaggctttttattaaagatttttgctgctacaaccgtacataccatacaacagatagatcctactatatctggaagttctgctccaactgctgttgctgtaatataagcaggtactgtaaatgataatgcagcgactaatgtaacaagaaatgcccccttcaatgcctttattcctccacctacgatgcataccataataaatggacttataaaacaaagaattccttcaattattactgtatttactgccaatgtgtttgatccaactccggttactgctgaaagcgtcacgagtggtattcctactgaaccaaatgctgttggtgtactgttagcaaccaaacatgctagaactgctgaaaatggatttaatccaacaccagcaagcatagatgctggaatagcaactgctgttccaaacccagccattccttccatgaaattaccgaatccccatccaataattaatgttaaaacccttttatccatagaaactccggccaacatttcctttatgaaatccattgcacctgtacgtaaaattaaattatacgtaaacaaagctgcaacgataactaaacagattggccacaatgcgttgagtactccttcaaatactcctgtcacagtataaaccacatttaatttccagaaaaaaatagctaaaaacattgtaagaacaagtgcaatagagcaagctttataacctggcattttaatccactgagtgcaactataagccaaatgataggtaatatcgccattaagaatttaaaaaacaacattcttttatcctcctcatacaatttttaaatggtataaccttttaaaaattgttattactattttggtcttaattacatagcttcccacttgttgattcaatactatttttacatatattcggatttagttgttttttatatgctgcgtctcttattcaattatgttttttaataattctccaagtatacaagtgtgaaatttatacataatttcattttcttgtgaattgagatttattttttggttatcccaccaactttttggtgggataaccatttatcttatctggaaaaagtatttattctgcttttgcttttttcatttcttcaatcataattggaaggatttcatttacatttccaacaattgctacgttagcaacttcaaagattggagcttcttcatctttattaattgccacaatataattggaacctgtcattcctgatgtatgctgtgttgctccagaaataccgcatgcaatataaagttttggtgctacgatttttcctgattgtccaacttggtgtgcacgagaaatccaaccgtcttcaattgctggtcttgttgcgcctactacgcctccaagtacacgtgctaattcttcaactagtttgaagttttctgcacttcccattccacgtccaccagaaacaataacttcagcttcttccaaattaacagattcagaaatttcttttactgtattaataatttttgccttaatagcatcagctggaatttctattttcctttctgtaacgtctgcatttgaagtggcttctggcttagggaaacttccatttctaactgttactacagctgttccctctacttcaatatgttctaagattgtaccgccataagctggtctagtatatataactttatcatcagctttactcattcctattacgtcacttacgcatcccaaattcatacgacctgcaatacgtggtgcaacatctttagcaagtgttgtattagctaataaaacaatatctggattttcttccttaacagtttctgataataattctgtcaaagtatcacaatctgtagctgtatcagtaaaaataactggaattccaaatgctgctattgtatctgcaatagctttatttcctactacaagagctgttccttctgcatctaatgcttttgctgcgttaataagttcaatacttccacctaatgccttttctccatctgtttcaatgaataataatgctttcatactttcgtttcctccttaattagattgccttatcttttttcatttgctccataacagcacttactgctaaagtagcatccttctcttgaatcttgataccagcctctttcttaggaggtgcaacatattctatgcaacgtacttttgcttgttttacctctccaatttctgctgctgaataagttgggattactgccttacggcttgccatcttactttttatagtaggataacgtggatcataatctggcttgcttactgttactacagctggacattctagtgaaactaaattatatccttcttcagtttcttgatgaatttccatagaattatcttttaaatcgatttcaatagcgctgctgacatagcctgtctttaatttttctgcgagcatagctccaacttgaccagtaatttcatctgtagattcttttccacaaagaatcaaatcaaatttttcacctttatctgcttcaatcttatgaatagcatctgccaaaacatcagctgttcccatagcatctaaatctgcatataagtcatcttttacaaaaaatgcttctttagctcctacagcaaggcaattttttaatgtgtttaaagaatcatctgctccaactgttaatacactaacttttcctccatgagcctcagtaaaacgaaccgctagctctaatgcatatgtatcaaatgcatttgcaaccaaactgactccatttaatttaggttttttcttttcattatccaaatggatttcaattgaatcatctggaacctgctttacacataacagaatctgcatactttccctctcctttatccttttaaattgcttaattgttttttgataaaaccattctgtatcttggtggtaaaaatcaccatcaaataaatactatcgctaatttattttctgtatacgatatcgtaaattggtcttaccaattcacaagtaaattctaacacacagtaccatatatttcaatccctaatataaaaatttttttattaatatattttaggttatattaacctcggattatgagaaaattaccatgattgattagctatacttctttccagaactaagattactgcatatttatctcattactaaatgataatttgcataaataaattttagaagatcaaattgatttaaaagattttactaaacgaaaagcaggcagaatatttcttaagatctcgccgttccataagaaattacaaaactgaacctgtatcaagagaaaaattgacaaaattaattgatattgcaagattggctcctactgcaagtaatagtcaaggcatatcctttattgtagttcaaaataagcaattacttgaacaagctttagaaatgactatccaaattatagaaaattcacctttaagacatttagtagaagaagctataaaaagttatagagaagatggctatgattcagtcttccgtggtgctccaaatttaataattgcgacatcagataagaatttttcaaacggtcgtaataatgctatttcttgtttaacttatcttgaattattcgccccttccctaggacttggatcatgctgggctggaattttcgagcattgcatagccattgaagactcaccactgcttaaattattcaatattcctaaagataaaaaagtcgtaggtgccgttatggttggatatccaaagtatagttataatagattagttgatagaaatccattagatgctacttttatagaataattaataattacactgaaaaaagctatcctgtaaaagatagcttttttctttctattaaaatttcagaactatatataaatgctactaagtattttcttcatttttcttttttgctttaagtatattgtaaataataccaagtactataaaccatacaggtgttacaaataaagcaacacgagtttcattattaagtgccaatacaactagaatgaaagcaaaaaatgctagaattatatagtttattattggataaagtggcattttgaatttgctctttgcagcaagttcaggattagttttgcgatatctcatgtggcaaataactatgactgcccaaatatagataaaacaaaatgttgatatacttgttataagcacaaatactccttcaggcataacaaaatttagaataactgaaatcaaaataacaattgctgaaaacattgtagcatttgaaggtacttgactagaagtcagctttttcattgattcaggtgcattttcttctttagcaagtgaataaaccatacggcttgtactaaagatagcactattacaagcagatgctgctgatgttaatacaacaaagtttacaatacttgctgctgctgcaattcctactgctgcaaacacctgaacaaatggacttttatccggattaattgaattccaaggatatatgctcatgataacaataagtgcccctatgtagaatataatgattctaattggaatattgttaatagcttttggaataacatgctctggtctttcagtttctccagctgtaaggccaactaattcaattccagcaaaagcaaacactaccatttggaatgaaagaataaaaccatttattccatttggaaataacccgccgtggctccaaagatttgcaaagctagatgcaccagcatctgttgaaaatcctgtaataatcataaatataccaattacaattagtgctaagattgcaacaactttaattaaagcaaaccaaaattccatttcaccaaataattttactgctgtaagattcataattagtaaaattacaagaacaataagacttggaagccattgaggtatattaggaagccagtattgtatgtataacccggcagcagtcaaatcagccattccaactgaaatccaacaaaaccaatatgtccatccagtaataaatgccgctccgttccctaaataatcatatacaaagtctacaaatgaatggtaatttaaattagatagtaataattccccgagagcacgcataacaaagaagcatattattcctgttattatgtaagcaaataagatagatggaccagctaagtgaattgatcttcctgaaccaaggaatagtcctgttccaattgcaccccctatagcaagtaactgaacatgccgattttttagccctctcgataaattctgattttctgatgttgacttatccatttttttcctccatattcactaaagcatctatataaatgcttttttataagtattttataatcaggcgaatttttgtagctattatttccccaatatattcctctaaaaatttaattttcactgttaaatactaatacatttttgacaaagttgcaatgatttcttgatttttataggaattttatataaatataaatgttattttgtcataatactttcatttgaccctttattacaggaaaaaatatatatgtccccagatttaatttatcgaaatgtatcgtaaacttatgtgagaaattaattagaaatcatattacttttatcaagcccattttctacaagaatcgcatataaagtaccatctgccttcatttcttttattttttcatttaatgcatttaataaagttttatcattatttcttaatgctatagctatatttccacttaattcaggattataatcttttagtattctcaacggtatatttttattttttaataaagaatatttcactataacagagtcaactaaccctgcatctatctttcttttatatatagcatccaataattcagttgaattttcaaagattgttatatcctttattattttatcatttttccacctttcacccatgctctcatatactgtacccttttctactcctactactgcgttttttagatcgcttttaaaatttatatttgaaaaggttggaactacaacagcttctgtggctttatatattggctgtgtaaaggctactatcttttcacgttcaggagttataaatattccacctgatgcgatatctatactgtcatcagtatttaatttatctaataaatttacaaatggtgagttcctagtttcaattttactaattccaagtctgcttccaatttcggttattatatcagcctcagttccctctaacttttttgtacttggatctatataaaaatatgaaacatcattttgcggtgaagcaacagttatctctcctttttcttttatcaactgcaatctatccttttgttctgatacattggttactataaccctactatcatattttccagcgctgctttcaaaaatcattccaaaaaaatttataatagtaatcaaaattaaaactttttccgataatttcttcatgttgtcctcctttagatgtcatttaaatttataaaatactattgagtcatatcctacaagatgtatcaactaaaatgaaacctctatgtttaatgtactattgctattttgttataaaatagcaaattttaaacataaaattcagtttttaaacaaaaataagagtttacttaacataaactcttattacttatctttctcattaaataattgaaacttctgcctcatccttaaggaataatggtattatttctaatggggcactatagtctattacttgtccgccattaaatatcttccctgaatttacatctttccaatttgtaccttttggcaaatatacttttcttgacctatgtcctttatgaagtactggtgcaacaagaacatctggtccaaacatatactcatctgtaacatcccagcaaagctcatcttctgagaagtcataaaataacggtcttataactggagttcccttttcatgtgcttccttcatgattttagtaatataaggtttcattctttcacgaataaacatgtatttcttaaatatttcatatgcttcgtcgccatagctccatacttcatttgctgcaccgcttgcacataatccaccaccgctagttccaagtggttttgaatgtggttcacgatcaccatgcaacctaaatacgggacagaatgctccatattcaaaccatctaattatgcattctctaaagtctggatcatctgaatttccaccatggaatcctcctatatcagttgtccaccatggtatacctgcaattcccatgttaagcccagctgcaaattgatttcttaaagattcaaaactagaatcaatgtcccctgaccatacaagggatccataacgttgacttcctgcccatgcgcatctaagaagattaattatattttcctgcccttctttcttcataccatcaaaaaacgtttttgcatacatagccggatatatattacctatttgtacatttgaacctaagtgatacctataattctcgaagtcataaaccgaatattctggttcagcttcagcaagccaaaatatttttatacctttatcataataatttttcttagcagttctccatacaaagtcacgagccgctggatttgttgaatcatagaaaacagtatctcctaaaaagttcatagttgttctaattcccatatcaactcttactaaataaccttttttaagcatcttatcataattttcgcttgtcttatctactgttggccaaatagaaaccattaactcaatgcccatttctttaagttctttaatcatagcatcaggatcaggccaataatctaaatcgaacttccattctccttgttttggccaatgaaaaaagtcaaccactataacagaaattggcaggtgccttttcttatattcacgtgcaatgcttaataactcttcttgtgtttggtatcttaatttacattgccaaaaacccatagcataatctggcatcattggcactgttccagttgcctttgcataagcttcttctatttcggctggagtatcacctgctgttataaaataatctaattgcttagtagaattcgctacccactctgtaatattttttccaaaagtaacttttccaatggctgggttattccagagcattccatatcctaaactggataatacaaatggaacactagcctgagaatttctatgtgcaagttcaagtacgcagttttttaaatccaaatttggctgctgatattgccccattccaaataacttttcctttggatttgattcaaatctcatagttaaagtataatctccaccaagaataggcttaaattcacgtgcttctatctctaaggcactgcaaaatctatttacatttttcctatttcttacatactcctctaaaagaacatcatctttatcattataaaatatgatttttccttccttatcaatccttgcacgaatttttccattctctatatatgcttcattattttcaattttaatcttaatttcacaattttcttgtggcaataaagcccaatcattattcataaattctgcttgcttagtgctacgtatacgtaaactattttttccccaaggctcgattcgtaacgtttcacagtcaaatttacgaattaatatatttccataaacttcaaaaacactatcatctaaattaatttccttattagattccatataagaactctccaatctttgattaattaaatttcaataattaaatccatgcttaggaatagaaccatgctaatttaattttgtttaaattagttttaaagttttcatgtgtcttgtttaaaagtatttactcttagcctttaacagcaccatttgttaatcctccaattatatatttttgaaggaatatgaatattaaaacaacaggtaaaactaaaagtactccataagccattatagaattccactgtattccatacttacccataaagttatatatactagctgtcatagttctcttttcagggctggttaaaaatgttagtgaatacgctaaatcgccccaagcatataagaaggaaaaggctcctgtcattataagtcctggataagatattggaatcattatttttgtaaatgctgtaaatgtattgcatccatcaatctttgctgaatcttcaagttcttttggtaaagcaagaaaataagttctaagaataagaactacaaatggaacagatattgttgcatctgataatattggagcccaaagagtatctagtagatgtaaatttttataaactaaaaacattggtgtaagtaataatgctactgggagcatctgagttactaggaagatcaatataaatacctttttccctctcatcctgaatcttgccaaaccatatgcagctggaatagctaatacacatgctaagatcattgaagctaatgcaaccttacagctattagctagtgttactattatgctgctctttcctgtaaattggtctgtataactacttaatgtaaaatctttaggtataaaagttggaggtgatgcaaagatttcggcattagttttaaatgaacttactataatccaatatattggaaaaagcataatacaagctacacaaattgatacaaagcataatattatatttttttgtttatcctcaagaacaaccttcttcattacccaatcacctcatcttcctttatcaatttgaggtatcctaaacttacgcagaataaaatagcaaacaatacattggcaacagtagcacctttactaaatgaaaattgcgtaaatgaaagtttatatgcaaaagttgacattagttcggtactattaactggacctccgtttgtcataacaaatactaaatcaaaaactttaaatgtataaataaatccaagaactaatacagataaaatcgctggtcttaatgatggcagagttattttaaagaatctctgaattacattagccccatcaactttagctgcctcatataaatcatatggaatattgcttaacccagttgttaataacaacatattaaatggaattccaacccatgagtttgttaatataactgaaaacattgaggttttactatctataatccagcctattggctgtgatatcaaattaaacttcataagtaattcatttattatacctccgcttgtactatacataaatttgaacaatagtgcagttactgtcataggtacaagataactaactaccataagtcctctgagaggttctgaaagcttaaattttaaattgaaaagcaaagctagtccaagtcctataataaattgaattgatatacttccaatagtgaaaactaaagtattccaaatacttattggcattgctggatctttaaatacttcaatatagttttctataccaacaaatggtttaacaggctgactaaaagtcgttacatttacatcacgaagactcaaaataaaattatatataatcggatatcccacaaaagccagcataaatattaatgctggaagcacaaatatgtacccttttctttcttccttaataaattctctgctatatttatttttcaaaattattttcacctaccttgcttcaattaaaaggtgtccttcactaagttataggatcctttagattttttatagattcccaagattaataattcgactcacacgtagaatacattgctataccagaaaaatatttatgctttctagtgcatatatgaacttaaagttttaacaattctatacatatattcatctaacaaatctaattcttaaatagcttatctatatatagataccccaactataagtgagatttacactatgaaatatatcccaactagaaataagaattatgcttttgtgaaatgtttcattaggaattttatggctctgattcttagattaaaagttgttccaagtatgctagttcaaagcttgcctttgaggcctagcatcttgggcgcaacttgtaatcttagaatcatccatcataatttccttagaaactggaacaacagcataattctcatttcgacgaaatatatgcacaagtttaggtcttagtttggtatctataaatttattttaatactgcatcaaccttaacctgtgcatcttttgctgcttgctctggtgtctttgcatttgtaaaactttcctgcattgcagtagacattgcatctgatatttcaggccattttggatgtggtcctcttggcatagcgtattgcaattcatctaggaatacgctcataacttggtctttagtaattttatcatcactttctgcaacatcttttctagatggaatgtaaccaaaatcagcacaatattcagtcatattatctttttgctgagtgtatttaataaaatcccaagcttcagcttcatgatgacctttaattataccccagttttctccacctaaatccgatgcaaatactttatctttaggaatttttacaactccccaatttaggtttggtgcatccttcttaactgtatctataatccatgggccatctgtaatcatggctgctttattagttacaaattgtttttctaaatcattttgtgtccagtttataacttccttactcattgatccattttttataagatcagtgagatattgaagcgaacttattccagcctcacttccaatttcattaaatttagctcctgttgaaataagccatggaagatattgaaaagttccttcctcattctttggtacagctatagctaaaccataagtatctccttttgtcaatttcttagctgcagtctttaattcatcaaaagttgtagggggctcaactcctgctgcacttaacatgtccttattataaaacaaagctaaatcattgcttccaagtgggattccatagtattttccatctaactgacatgatgaaatcggtcctggataaaattgatctttaccatcataggaattcatcttatctgtaatatctgcaaataatcccatcgccgaaaatgaagccatatctggattatcaactaaacctatgtcaggtagtttgtcagcaacaagtcctattgtaaactgcttagtaagttcagctcttggtacaaattccacttgaacttctaccttatcttgagatttattatatttatcagcaagattttgcattgcattttgttgttgttgcccatcaaaatagtgccatactgtaatcgttgtctttcctgccggatcagctttagtttgagttgtgcccccaccactgcttccacatccaataaatatagtcgccgacattgcaatagctgtcaaacaagccagtaactttttagtttttttcatattatttacctcctaaattcttatgaataataacgttttctataacttaatattacatcttctaaattacttctaatattctattatcatgaaaaaagtgtaaaatcatgatattaattttacactttgtatttaagcctataaaataacaaatattcgaacttattatcgcttatcatttcttaataaaatttcatatattcctttggggacattcctgttgattctttaaaaactttgcaaaagtactttgaatcactatagccgaccttctctgcaatttcataaatttttagtttattacttcctaataattcctttgctttatgaattctaataggcgtttgcgaaacgccgcaacccgcagaaatgcgggatatttttttagcaaaataaaataactcctcactgatttatggtaaaattgaattgcctaaaaacaaaactaccatatacctcagaaaggagtcatatatatgataacatataaacagctttctttggcagatgtttattctgattgcaaagaaaaatttgaaaatgataaattccaatttctttctttactcgaaaacactatcgaccttgatgagttagttcctgcatctttcattaaccatttttacgcttccacaggaaggccgcgaaaatatcagctttatgctatgatcagtgctttaattttacaacgcattttttctattcctacagattctcttttaattattttccttaaatattctcaagaactaagagacttctgcggctttttaagagttcctgattcatctaagtttactcgtttcaagcaggactttcttttggacttacaatccatgttcgataatcttgttgatattactgaaccgatatgccaacagattgatacggctcttgcttccatgactatttttgatacttcaggccttgaagcatttgtcactgaaaataatcctaaatatgctaatcgcattataaaacagcttaaaaattttaagaaagcatgcaatttagatgactcttatgatccttataaagctgcctatggctctatgccatcacacgcttcagccaaccctgccatccaacaaatgtatattaatgggcatttttgctatgcttttaaattcggaatcattactaatggcctcggtatcgtaagagatatttcgttctataataaagattttctcaatgctcatcctgatattattgttgagaaaaaatctgattcacctgatgaagataaatctcttgcagattctaaggctcttatccctgttctcaaagatttttttaacaagcatccattaataagtccaaaaacctttttaggagatgctgcttttgacagtattcaaatttatcgtgatcttcttctcgaattaaaatttgataaagcatatattcctttaaaaactaggcttacactagaaaatgctgattgccctttaaacgaagacggcattccatgctgtccgaatgatccttctattccaatgaaacgtgaaggtagtaaaagtcatcttcgttctagaattccaacaatgaagtttgtatgccctaaaatgaaatggttatataacaaagaaaccaaaaagagcaaacgtgtaactcaatgtgaaaatccatgtacaaattccttatgtggacgaatgttttatatttatcctgaaaagaatctgcgcgcatatcctggaataacacgaggaacccaagaatggagtaatacttataaaatcagagtagctgttgaaaaaaatataaatcacttcaaatatagttactgcgtcgcggagcgtaagactcaaaatgagcaaacacttcatgctgatttacttctagccggaataactcaactaataacagttatcgtggcagataaaattcataaacataaatatatccgaagcttaaagccattaattgcataaaatttatttataaaaattggaattcaccttcgctttatttcgtgcgcccttttttaagaagtcaactattatatttgtatagcaggaaccattaaatccattaataatgtttttgcaacttcaaatcaatcattattcatttttatcaatgagtttcgcaattatctaatgaattctaaattcttttaaataatctgaaaaactttttccaagttcctttgtaaataacctacttaaatattctggagttatgttcattccacttgctatttcctcaagagaaattttatcactataatactcttttatataatttatagcttttcttacaatcaatgaatttactttagtctcatcatcatttcttttgcacatgttacggattatataatttagccgctcttttaactcatcaaatgtaaaactattcttaatcgaatctaaaacgccttcattattaaactcagtataaagattactattacagcttttagccacagttaaaatcgaaaaaatatacctgctgctaacatcaattatctcgcatgggtcgtagatgttttctttcaaatatgatataaatttttcattaatatcagccaactttttctgatcattgttttttatggcttttaacacttcattttcaagctctcttggataactacaatgatttatttttaatttagatattagttcttcatggatcacttcattatttccaaatgaaataggccatctagacaatctttgtagctttttaaatgaatttttaatttcagctagttcgtttagattaataatactaatagtagtatttaagaatcccttctgcctaagtgaaaataatagcttatgctttagcatttttataaattccaagtaagcggttttagtaattactaaaataggcaaataattatactcttttaaaatagagtaatagaaatttacgatatggtaattcttcatagcttcataaatctcttttattataaattcaatcttgtcttcgtatttatctctaagatgcaaattaataacatatatattttcattttgcttaactttactttcaattattttgtaaaaatgctctaaattttgtcccttatttagtagtacttgtcctaatatttcttccttaagtataccttcttctagaagttcatctttttccttacttaaattaagctttttttcaatatcctccatggtattttttaaagcagtataagttataggtttcaataagtactctttcactccaagttttattcctttttgtgcatacttaaagtctgaatatccactaagtataataatatatggatcttgaccacaatccttaatcttttggagcatatctaatccatttattttcggcatttcaatatctgtaaagataagatctggcttatactctttagctaaaaggaacccttgctctccatccaaagcttttccacaaacgatgtaattttcattaatctttcctaataagttccccagtccttctctggcattaatttcatcttctacaattaaaattttcataaatatcccccttaaaatatcaatgaaataatcaaagttattgtagttccttgccctttaacactttcaatattaaatttagcatcttcaccataataaatctttatcctgtcatatacattttttatgcctatattctcatcttcatcttttcctgatgttatattattaattatctcttgaagctttctatcttcaatacccaatccattatcttttactatgatttttacatagttatttttaaatatatttattctaacttttaatactctttcactatcatatcctttaaatccatggataattgaattttcaattaagggctgtaatattaacttatgaattctagcctctaagacattttcatctacatctaaatccaatacgaagctattattaaatctaagctgctgcaaatatacatatttcttcaaccattcaacttcatcataaatagtcacttccttattaatatcgcctatgctatatcttagtatttgagcaaagtttccaatagtatcactcacttcataattttcatttttaatcgccatccagtttatgcaatctaaagtattatacaaaaagtgaggattaatttgagcaacaattgcctttatctcagcttctcttcttttatttgataattcaacaataaaattactttgatcttttatatctcttatcaagatatttattgtagataacatttcattaaattcgtctcctataaatgacatttcatcttctgtacttaactttattttcacattgaagtttccttttttagcttccttcattccactgacaatgattttaactgactcatacaatttatttgagaatattataataaccaatgttaagattataagtatcaatcctaaaaatacgaaagttaaatttcttaataacttaacttcataaaataaattatctttatcaacaacattaatcactttccatccaacactatctatgagaatactgctaacagatatatttctatctttaaaagtcggtattgaatatattaattgatttagtgtttccatattatcagtatcattaatctcactgctagaataatcttttacatatgtcccaatgtacttcttatcttgaaatgatataactctcccatcattatcaactattacagagcacatattaagcttatcttcctcaaaatcttccttatccatctgaacattacaaacatcaaatagaatttgttcatcaaaactcataataattatcccaatttcatctttagttctgatatctctaacttttagtcctatgtgaaacatatactcagattttccatgaataaagctattacaagttgtaggtaatattacgggagtattactatttaagatttcagaataaattctacttttgtcagaattactatattcttcccatattctattgttaattccttgattacctttatcataatatacatttcttccattattcccaacaaaggttatagccctaatttgatttcttgaataagaataagatccaaaggcatctctgattttattgatagaagctgccttttcaaattcatttccgtcattaaacattttctctaattccaaacaatcattatctgctgcaatcctatataaaatatccttataataattcatatcagtttctatgttagtttttatgtaaaataaatttctatccgtaagatttgtaatcttcttttccaggtaatgttgtgacagcttatataaaaacacttgactaagaaccattggtataattgaaataattataaatatacttaacaattttgcttttatactataacgtttccaattgaaaaaatatctaattgtattcgtcctattgttaaaaaatttcattatttataatttcaccactctttaagcacattaaaataaataacaagtccaaagttgccatgaatgtttttcctcagacaatgtgaggcgacaaattgtcctcatggttccatctattaggtgaatttgccaatgtagcatgatggaaaataggctgacaaaaggctttttatttatttaattgtgtctcattattttaacttaatacatacattatattccattattttactatcaagcaaccgtacaacttaaaattcttctcacaaaaagttaagaatataagaaagtaacactgtaactttttatattcttagcttttttccttttttaattgtaaaaaaggtttattgtaatcagtttaactttcttacttctttcaaatttatttttttagctatatataagttatggaaaacttaattcattaatacttcccctaatttatcagatacaaatactgctgtagaaaaggtggtatttaaaaaagaacaaaagcaaaactgctagttacttaagaaaaatcttgtaactagcagtcttatttaacttattaaagataatcatttaacttttggtgggtttacctcatcaaaacttccaataacaaaatatgaagcctgagcctgcacaaggatcttctcatgctcatcaaatattttgcatgtacatctcattatattttcaccatcgctgacaaccttacccactgccgtaattgtgcttcctgcatttacgttttttatatagctaatacttaaatccgtagttactatacgctttcctagagttgtgcaagaaactcccattacaacatctgcaattgaagccaaggttcctccgtgtatgtatccatatatattacaatgcctatctataattttcatttcgtatataacttttccctctatgacttcaacaatttgaggatcaagaaaattttcaagtatagatttattataattttcctctaaataactttttaaccaaacaagatgttctttcgacataataactcctccttcacttccacgcattacttaaaatatctttcttaataacctgtaaagcaattactagttttacctttgttttacgcaaatatatattattttcactcaatctttcagggatatagaattattatagcaaacaaattaaatatatcctaacttataactaattcctagaattgaaatacaatgtagttcatactatttagcttacacaaaaatccaagttgaatataatttggatttttattgatttttataaaaatattatataaaatgaattagtagactaattgataacaatattcaattaataatcaagaggtgaatgatttgaatataagaaaaaacagtataagcgaagacgctcctttatacactttcataaattttactagctatatttataataattacaaaactttcatattcattattttaggtattatttgtatatcattattagatgctttttactgccttgtcgtaaaagcaagagaacagtcaaaatatttaaaagacttagatttagaacgcgaaagatattttatagttgttgaacaattaaatgatattatatttgattttgacataactgagaaaaaaatcttaagttcctctaagtttgaagaaacctttggatggacattaaatattcaagattataataaaggttttttaaatgaattgaaaatacatcctgatgataagatattaattaataaaatcaccgatgacatgaaagctttaaacaaacagtcaattataaaacaaatcagactaatgaagagtaatggggactatctttggtgtgagctaaaactaaactatatacaaagagataataagattgtcagagtgataggtaaaattactgatattgatcatattgtaaaagaacattctctgctaaagctacgatctgaatatgaccagctaacacaaatatataataaatctacattctatgaaaaagttaaaaattatattatagataacaaaaatgataactgtatgcttatttttatagatttagataattttaaagctataaatgataatttaggacatatggttggtgatgaagtgctaaaggataccgcaaataaaatttgtgacgtctttaacggtacagatgttattatttcacggtttggcggagatgaattttgtgtatttaaaccaagtcattctatttcatttataaaagataaaattagtattttatgcagtaaccttaatgctacatatattggcaataatactgaaataactgtatctgcgagcataggtgttgccttttaccctaaacatggagatactttagaatctttaattcataaatcagatatagcattatacagttctaaagaaaatgggaaaaatcaatttaccatatacaacaaaaatcttgaaattgaatgttgaattaaatctaaaattaagaaatcctcgaaattactatcgaggatttcttaatttttagtttgaaacaaggaataaatatacttttatcaaaccctatatacctaaaatacctattgagtatcctataactccaaatatcattaaaccaaccatacatataagaggagatacttttttctggagtaaccaataaatcagaaaagtcagcatcaatggtagtatattaggcattatgttatctaactgctcctgaactgtatatgatgttaatgaacttccttgcgttaaagtataaaggacgaatggtacttttattatagtccactttgcaactaatcctcctattacagtataagtaagtactactaaggcacttctatactttggcaccgcacctttaagtttattaattatactcgttccttctctataagctatcataagtccattatatcgtattattaatctcacaatattaatcattacaaaaaataagattggacctgcgacatttccactaagtgatattccggcacataccgctgctattacaggtcttataattccccatataattggatctcctatacctgcaagcggcccggctagcgctattttaatctgaactattcctgattgatctactttttcctgcatactttcttcaactgcaatattagctccaagtattacatttgaaataaatggctggcaattaaagtactctaagtgaacctttacagctttttgtaactcctccttacttctatatagtttttttagaataggcatcatgcaataacaataacaaagattttgaagccgttcatagttccaagatatttgataaaattgacttctccaaaaaactctcattaaatcctttttagtaactttaacttttatgatgttttcttcattttcaataaaatgctctctctttgttctagtcttattacttgctttttcaatcatatttgaaatttgtaaatatattagtgctaagctaattcccataaaagttaatccaactaaggtcatctgagaaaatgtcattactaaaaatcccattaagaaaaatgcaatcatttcttttacatttaaaattctaagaatcattgcatatccaactacaactaaaaagtcactagacacctgaagtcctttagttattgcctctggaacataatttaaaatactattcaatatatttgcatcagcaaacaatgcaactaacattgctggaatagccatccttaaagcacttggaatggctgttataaaatgtgctgctgtcaccttccaaagctcacccttatctacacccctttctgcccaatgcattataccaacatctatagttcctttttgcagtataaaaagcatttgtcctacaacagctaatggaattgcagtccctattgctactcctatactttgttttccaagcacacaaagtatgactgccactatggaagataaagttgaatctggtggagttgcaaccccaatagtcatccatccaagagcaattaattctacctgggctccaattataactcctgtctttatatctcctaaagcgattccaataagcgtagccgtaaccaagggcctatgagtttgaaattcctctgaagcagatccaataccacatattgaagcaaataaaaatataagtaaggcttgtgttaatgacattattaccttctccttgcttttagagtattaaaaaactctgtcttcttatctgttggtagaatccttatctctatttccacctcagaatctgcaattttcttcaatgcctctatctccttatcatctaaataaagattggtatttattttttctttatctttcttaaatgacattccgcctaagtttagactttttatcttacctccaccttctataaactcaagaacttcaaaaggatttccaaagaccattattacatcttcatactcacattcctcttcataaagttctaaagcctttaaagtgtcacaaaatattatttttatatcttcaggaacggataattctataaaagtttttcttatatcattttctgcaacttctttattaacaactattatttccgttacatcttcataagtgcaccaattatttattaattgaccatgtaccagcctatcatctaatctaactatttttagcactataccgctcctttcattttacttttgtatatcattgtaacgctgccttatattaattacaccgttttgaccaaaatgttcagctaaagaagatattttctctaaatcctgaaccatatatggtattatttctaaaatcattggcatattcatacctgtaattatatttacattttttctgtccataaataagcatgccgcattatatggtgtcccgcctaagatgtctacaagcattaaaacttcatccacatttagctcttcaatagtcctatctatcttatctttaagactttctatacttttatcgacttcaagacagatagttcttattttttcctgcttaccatatatcatctcaactgaatttattagtgctttcgcatagcttccatgtgaaattgctattataccaaccattttaatacacctcaagatatgtttattaattatcttttatatattaccacaccttgtgctactttgttaactattcctgactcacaaattaaatctgtcttagaacctcttctaatagcatttagtattgcaaagctttgaagatatagtgaatactgaaatactatatgactatcatcactatatttaaaattatttttgttgaagtagaaataataatcacaatttttatctatttcttcatcgtaatccatagaaatagcaactatagtactatttattttattactataacattcttttaaaacatctaattcgtattttatactctgagaatcattgctaaagaaaaatgatattaaacactttgaattcattgcaagctttggaccatgtctaaattctaacattgagtggaattctgtacgttgaagccccgttgataattcacttatctttaaacacatttctgatgctaatggatttaaagctccagttccaagtgctgctactgtgtcatatattttattacttacagcatgagatttataaatatcttcttttaaaaatctgccagcatcttcaataatatttttaaacatctcttcataataatcataattattaatgtcaaaaattaaaagaagatactctataagaagtgtgaattctcccgttgcagcaatacttttatccttcgtccttggaggaataggaatatataaactatttttatcttctccatatttacttataatttccccttttccattacaaattataagtagttgatataattcaattccttttttcttgaaaatttcaactgcttctaaaccctcaattgtatttcctgatcctcctaatgatactaaaagcactggtgaattatccaaaatataattatcctcattttctatgagagttgtcgaagctattgatataacttcctttttagtaattcttcttaaataattttctgttattgcagccgcttttgcagagcttcctgctcccactaagtatatcttaagtccttctacttcttctatcttatttagaaaagctcttattttgtctgtattcctttttattatttctattccctcttcccataattctaactgtctttccatttctaaagctgtatgatatccatcaattctctttaattcatcttcctgtattcctaaaattctcattaataatcactccttaatactaatcctcatctctataaaatgggactgctacacaatctatttcactagattgtgtaacagtcatcattctaaagttcttaattcttctttattagtttatatcccatcatccatagacgagtgatcattatatgttgaatttgttgtattaatttttataaatcttactgctgtatccttagtagcatttacaacactatctgctaatttagcaattcccatagaatctttaagtaaaattgcttctagtattgcacctatattgcatccagctacaacttccatattttctttttcataagaaagttcaacacatactttaaaaggtgtccctcctaaaatgtcacagacaaatagattttgctctgctttattattaactaaggcattaattatcttgtccttcaaagttacatctgtatcttcttctaaaaaatcaataaattcaacgccttcattatgtccagctaaaagctttatagaactttcaactcctgtgccataatttccatgtccagctatgactatattagtcttcattataatacccccaataatgatagcaatattgctaatgcaaatgtaactaaaattaagatggttggattaacatttttcttctttaagaaataaaacataagtaatgtatatcccataggtagtatattaggtaatattttatcaacaaaatcagtttgtagtgatatagcatgatctgcacttattggaatgcttggaagtaaagtgatatgcacataagatgctattaatcctccaattacagtaactccaagagttgttgccgctttagaaatagattttgaattttcctttaaaatatcgatagcttttactcctagcttataccctgcacttgtccatattatacgagataagaatacgcatacataaacaccaaagaatagtataggtcccacgatactgccttgacttgcaaatgatgcgctgattcctgcaactattggtaatagagtaaaccaaagaagtgcatctccaatacctgctagcggtccaaataaagcaacctttaaaccttttataagacttctatcttcactattttcttctagcgataaaactaatcccataagaaatcctaccaaagttggattagtatttataaattctaaattatccttcatagattgtgatactttctctttatcatcgttatgaatcttctttaagaaaggtagtaacgcacaagtccatcctgctgcctgcattctttcatagttgaaacttgcttgtagcaaaactgatctaaaggcaagttttctaagatctttcttggttaatttgttattagattccgtcttcataatcttctcccccttgatttgaatttactacatttacaacttgagctttatttttatcatttacatatccatataaagcaaaagctgctcctattaatgctactggtaataaatttgtaaattgtacaaatgaagctactaaaaatcctataataagaaatggaacatattctatcttaagcattactctaagtaataatccaaatccaactgctggtaaaattccacctgctatttcaaatccgtgttttaaccattctggcatactttcaactaaagttctcattggttcttgagcaacatatgtacaaaggaatacaatcacaccataagttattccaactataagagttgttgttatattcaatcttgtaaatgctgcagtatcgccttcttctgcatacttatcagctttattcatgaatactgaaaatgctgaatagtaaaaaagaattacatattgcattaagaaactaaatggtagtgctaatccaattgttgctttaacgtctgctccagttgtatacgcaataactgttgtcataatacctgctagtattgggttaggcggctgtgttcctcctactggagtaagtcctgcgaaagctaattcagtaagtcctcctgcgataagtcctgttgttatatctcctaaaatggctcctgttaatgtacatactattattggtctaaatatatataatccttctaaccagaaatcaaatccaactatcattgccataattgcaagaagaataccttgtaataacgttatactatgcattataattcctccctttattcaatatttgttttaatatctccaggtgtatcttgtgcaaatacttttacaccctttgattcaatatattttagatcttctatatctttatcatctacataaacctttttagtaatggctctctttccatctgaaaagtgcatatttccaacatttaattcttttataggtactccaccatcaactaattttcttactacctctggtgttttacatactataaaaatcttttggtttggagacgctttgtgtataacatctatagttttttgaattgtgaaaaatctgattccaacccctgaagattctgctgtcattgacattaattgttgttgtactgtatctgatgctgcagtatcatctacaactactagtaaattagctcctagggatgtcgtccaagtaacgcctacttgtccatgaactaatctgttatcaattcttgtcattaatatatttggcatatttaattcctccttaatctttatgcttatatataaagcaagccccatgccaagtagtgtacatattactacttaacatggggcttttttatatgaatccatatattcttttacttatttaagttcaccagaacaatctaaagccttgtatttgcttgttttatttatatttctaaaaactttattaaagatcaaagtttttaactttatttttaatactatcatatataaatcctatttctgatataggaatctctactctatagaaattttctattacactaaaagcttttctcgtcatttttataaagtgtacatgacactgttcaaaatcttcacaatctctgtaattcataataggatcttttattactaatctttctatcatacagcttatgtgtatatataaacttatctttaaatcattctctagtttaaagcctagacttctttctaaattagtaagagcatcttctacttgatctactattttatccggatttaatattgtaagataatttaaaacattttctaatgtaaataacttaacagcttctttatttatcttttcaataatgttattatctacaattccttttaatgtattaaataatactgaatctgcttttttcattataagattttctaaagatataaaaggaatattctctatctttggatcgtttgtaccaattatgagttttacattatattgtttaaatacaaaatcttcttttccattttcttttaaactttcataatcataagcaacaacttttacttcatcctcattaaaacagctgtttaacaaatcttttatcttgcttgctgttccaatacctgttatacaagttgttattataacatctgttttcttcttagtagattctatataatttactttacttacatttttcttagatgattcttctgcaatttgttttaatggctgtaagctaagaattctgcttcctatatccaaaactaatttagtagaaacattatctactatagctatatctccgtatatttctttttccaataatatataaatagtctcaagagaacccatatctacaagtattaaaagtccctttgaagtatctattgttttgacatattctaagatcttattacttatatctaaaggtgaactttctataggcatatcaaatggctcaaaaatatatttaccaaacagcctgttagctacccctgcaatactgcttgcagttgaatgaccatgagctattattattgcattaacattattttgaatagacttatccaatgatcttatatatattagtaaataaatttctacttctttatttatttctaaatctaagttattatgaatatcttcaattatctttaaaaccagcttatactccttatggaactttttactcaattgttcgattaatgaaatctcttctttaatataaccttcgttttgaaattcaacaaaatatgttataagattagccataatttccgaactatttgttaaataatcgattccataatttaaattcataaaatgcaaagtactttcaactgttttttctattgacctatatataacattttttgagtttctatatttctcattaaaaactatatgatcaatcaagtcattaaatattttagttccattaataaaaaactcttcctctgttattttgcctttttctaattccttgatagcttcatttaattcttctgtaattcctgatgccttatttatatgagtatttaaataatctcgatcatttttttccgaacagcttataaacatattatttatatttaagttattaaaactaatatcctcatcctgctctattatatccttgggaagattattaatttttacttttaatacttttgttcttttctcctgcgtattattcaaggaatttgcacagctgagttttatagcatttataagtttaccaatattaccatgagcattactattaatcaatatatttataacctgactgttaacaataatatctctatttatatttaaggcttctctcttataaaaattatctataaggtctagcttttcttttaagggcctctatttaaagcttggtatctttactattagtggtatacgccttaaaaatgtctgaagaaatttattctcaggattctctgtagttgcaaaaatcaaccttacattggcgtatctttttttctccgtttcaccaagccttctaaatatccccttatctaaaaataagaataatttttcttgaccttctggcggtagtctgtgaatttcatctagaaatagatatcccccatttgctttttcaatgagacctattctatcactatcagcacctgtataagcccctttggctgatccaaaaagtatcgcagaaaataactctgggttatttgcatattctgcacaattaaatatttcaaaaggggcaccttcttttatatagctgcaatttctcgcataatcatataccttttgtgctaaaaaactttttccaactcctgaacttccaataagtaaaaatggtaatccatttggtggatatgagactgctgatttgcactgctgaacaacatcctttaagctgccgctcgcccctataagttccttaaaattatctatatcattattagtatttaaatagttaatttctttaatataatcagaaatcagtgtaaacctatcactatcttcttcatacacttccttactcataaagtagacaggtctcttatttatttttattgcttcttcctctttagtcagctcatttaatacatggcttactaaatttctttgaagcccaagtttatctgctatagtaagagcatttattccgtattccatgcttccatctattttaagagaaagttctttcaactttattctaatcttttccttattagtcatagacctgcctcctaactctttcgtttatattaacatatactgtcacctatatttatatacactaccactatcagttggtttaacattgtatctaaatatagaattcggattacataataaagtataattaatatatatgttgcaattcacaattacggctaaaattcttgcaatatttttagaattatgatgaagaattacttttgcagtatatgatattatttaacgtaattttttaaaattttattaaaatcaacttttataatatatatcaacttggattttaacattaaatatatcatttatgcaaggtcaaaagtctagaaattttaataatttatccgattattcatgttaatcactttgttggctaacaaatgctttaatcttcaaatattttgttatatgaaaaaaaataagttctagataaactagaacttatttttcaacttggtgactcctaggggaatcgaacccctgttaccaccgtgaaagggtggtgtcttaaccgcttgaccaaggagccatattaagttttatttaaatggagctggcaataggaatcgaacctacaacctgctgattacaagtcagctgctctaccgttgagccatgccagcatatttaaattaaattggcgactcagaaggggctcgaaccctcgacctccggcgtgacaggccggcactctaaccaactgagctactgagccgtattatggtggctcgaactggaatcgaaccagtgacacgaggattttcagtcctctgctctaccgactgagctatcgagccatcttacctcgcaacgtcctactctgccacacagtctcccatgcagtaccatcggcgctatagaccttaactttcctgttcgaaatgggaaggagtgttacctctatgccatcatcacgagattaagtgagttcccaaatctatgatttggtcgaacgaacttatgcaaatcgctttagcgatttgtcttcctttttgaaaaaactattgttctttcaaaattgcacacagtttctttaatgtatttacaacttgactatattggtcaagccctcgacctattagtatcagtcagctaaatatgttaccatacttacacctctgacctatcaaccttgtagtcttcaaggggtcttactagcttatgctatgggaaatctcatcttgaggtgggcttcacacttagatgctttcagcgtttatcccttcccgacttagctacccagctatgcttctggcgaaacaactggtacaccataggtcagtccatcccggtcctctcgtactaaggacagctcctctcaaatttcctacgcccgcgacggatagggaccgaactgtctcacgacgttctgaacccagctcgcgtgccgctttaatgggcgaacagcccaacccttgggacctacttcagccccaggatgcgacgagccgacatcgaggtgccaaacctccccgtcgatgtgaactcttgggggagatcagcctgttatccccgaggtagcttttatccgttgagcgatggccctcccacgaggtaccaccggatcactaagcccgactttcgtccctgctccacttgtaggtgtcgcagtcaggctcccttctgcctttacactcttcgaacgatttccgaccgttctgagggaacctttgggcgcctccgttacattttaggaggcgaccgccccagtcaaactgcccacctaacaatgtcctgtcaccagtttcatggcatccagttagaacttcaatactatcagggtggtatcccaacaacgactccaccaaggctgacgccctagtttcccagtctcccacctatcctgtacagacaataccgaaattcaatgctaagctacagtaaagctctacggggtctttccgtccaatcgcgggtagcgagcatcttcactcgcactacaacttcgccggatttgcagttgagacagtgcacaagtcattacgccattcgtgcgggtcagaacttacctgacaaggaatttcgctaccttaggaccgttatagttacggccgccgtttactggggcttaagttcacaccttcgcgttaccactaagtgttccccttaaccttccagcaccgggcaggcgtcagcccctatacatcagctttcgctttagcagagacctgtgtttttgttaaacagttgcttgtgcctattctctgcggcctgatttctcaggcaccccttctcccgaagttacggggtcaatttgcctagttccttaactgcaattcttccgtcggccttaggattctctcctcatctacctgtgtcggtttgcggtacgggcactacttctctctctagatgcttttcttggaagcatggaatcagatacttcggttccgtagaaccttccccatcacgcctcagaattgttggaacggatttgccaatcccaactccctaaacgcttagactagcatccaatagctagcacatcctatccttctccgtcacaccatcgataataacgattatagtggtattggaatatcaaccaattgtccatcgactacgcctttcggcctcgccttaggtcccgactaaccctgagaagacaaactttactcaggaaaccttagatattcggcctgtaggattctcgcctacatctcgctactaatgccaacattctcactcgtaatcagtccaccgctccttacggtacgacttcagcccgattacgacgctcctctaccgctcacgctaatgcgtgaacccgtagcttcggtggtaagtttgagccccggacattttcggcgcaggatctcttgactagtgagctattacgcactcttttaatgagtggctgcttctaagccaacatcctagttgtcttagaaatcccacatccttttccacttaacttacactttgggaccttagctgacgatctgggctgtttcccttttgaccatggaacttatctttcatagtctgactgccggactgatagtatgtggcattcggagtttgataaggttcggtaagcgctatgccccctagcctattcagtgctctacctccactactcacattttccgacgctagccctaaagctatttcgaggagaaccagctatatccgagttcgattggaatttctccgctatccacagctcatcccatgctttttcaacagcaacgtggttcggtcctccacgaggttttaccctcgcttcaacctggccatggataggtcacccggtttcgggtctacagcatgcaactagtcgccctattaagactcggtttcccttcggctccgtactttaagtacttaacctcgctacataccgtaactcgttggctcgttctacaaaaagcacatcatcacacacataaggtgctctgatcggttgtaggcacatggtttcaggttctatttcactcccctcccggggttcttttcacctttccctcacggtactgcttcactatcggtcatcaggtagtatttagccttgggaggtggtcctccctgcttcccacaaggtttcacgtgtctcgtggtactctggtgcagaactgattatcatagttttcacttacgggactattacccactatggtccaactttccagttgtgttcaattaactatgatttctcgttatgttctgtccgcaaccccagagataaatctctggtttgggctctttccttttcgctcgccgctactaagaaaatcgatttttctttctcttcctccaggtacttagatgtttcagttccctgggtataccttcataaagctatatattcactttatgatacatggggtttcccatgtgagtttcctcattcggaaatcttcggatctctgactatgtgcgtctacccgaagcttatcgcagcttatcgcgtccttcatcggctcctgatgccaaggcattcaccatgcgccctttgtagcttgacctaattattagtcatatcacaaagaacatttattcttggctttgttgtattttatatatacattaaatctatgtgcaattttcaaagaacatctgcttgcttattaacttcaattgcttcatcagctttaaattttactcattcccgtacgtaaagtacccttcatttcataaaactttcgcttcttcgcacttgttgctattaagctacgcattttgaaagacttagtctttcaaaattgaacagaacaaatacttaagtaacctttgagcaagtattttatattttgatacataataatgtatctgtactagtcagacatcatgctgatctagatttctccatagaaaggaggtgatccagccgcaggttctcctacggctaccttgttacgacttcaccccaatcgctgaccctaccttaggtcgctgcctcgcttgcgcgttagctcacgaactttgggtattgccaactctcatggtgtgacgggcggtgtgtacaaggcccgggaacgtattcaccgcgacattctgattcgcgattactagcaactccagcttcatgtaggcgagtttcagcctacaatccgaactgagactggttttaaagtttggctccacctcgcggtttagcatctctctgtaccagccattgtagcacgtgtgtagccctagacataaggggcatgatgatttgacgtcatccccaccttcctcccggttaacccaggcagtctcgctagagtgctcaactaaatggtagcaactaacaataagggttgcgctcgttgcgggacttaacccaacatctcacgacacgagctgacgacaaccatgcaccacctgtcttcctgccccgaagggcttccccgattaagggtaattcaggagatgtcaagtctaggtaaggttcttcgcgttgcttcgaattaaaccacatgctccgctgcttgtgcgggcccccgtcaattcctttgagttttaatcttgcgaccgtactccccaggcggaatacttaatgcgttagcggcggcacagaggtcatgacaacccctacacctagtattcatcgtttacggcgtggactaccagggtatctaatcctgtttgctccccacgctttcgagcctcagtgtcagttacagtccagaaagtcgccttcgccactggtattcttcctaatctctacgcatttcaccgctacactaggaattctactttcctctcctgcactctagatatccagtttggaatgcagcacccaggttaagcccgagtatttcacatcccacttaaatatccacctacgctccctttacgcccagtaaatccggacaacgcttgccacctacgtattaccgcggctgctggcacgtagttagccgtggcttcctcctcaggtaccgtcattatcgtccctgaagacagagctttacaatccgaagaccgtcatcactcacgcggcgttgctgcatcagggtttcccccattgtgcaatattccccactgctgcctcccgtaggagtctgggccgtgtctcagtcccaatgtggccgatcaccctctcaggtcggctacgcatcgtcgccttggtgagccgttacctcaccaactagctaatgcgacgcgggtccatctcatagcggattactcctttaattgctataccatgcggcactacaatcttatgcggtattaatcttcctttcgaaaggctattcccctctatgaggcaggttacccacgtgttactcacccgtccgccgctaatccactcccgaaggagcttcatcgctcgacttgcatgtgttaagcacgccgccagcgttcgtcctgagccaggatcaaactctcaataaaaagtttaatcttagcttactcaaataaaaattgctggtttacttaaatgtatttatgttattctgttcaattttcaaagaccaatttttctttctaaaccttcttattacaaggctttacaagtttctgtcgtttctgacagcttactcagtatatcatcgctttcagactttgtcaacaaccttttttaaaaactttccaaacatttttctcaaacattttaccagctttaagttattgaattctgtgcttttcagcgacgaattacatcttaccatcgttatttactcttgtcaataactttctcaaaagatttttttcctttcctataggtatctaataagattaagttatttctaaaatcatgtctcttaacgacgtgttttatcatatcatctgcgttatacttatattctttattatttatccatttaatgatattattcatagtattcgtcatatttcttcaaattcatggttttcatttatattgacacactagaagtagttgtccacatagtatctattatagttaaatatgtatattatagctttcattataatatttataaagtgccatatatatctctggtatttatataatatctatacatctactttgtaggctaaattcccaaattaagttcattaggaatcacaacccaccctatagaattaaaagctacttccatatcatgattgctgctttgcgtaaatataaaaccagtttttattccaatttccttcaattttcccaaagaacgatctaacattcttttttcgatttcattaactctatattcactatatatagcaatatgatatataaatcctcttatgccatcgctgccacataataaagctccaattaccttcccatcttcgttgcatgccacagaactagcttttggattcttttttaaatatgtgattaattgttctttagtcacagattcttctaaaaatgatgagccaaaaatatctctccatagtttaattacttgatctatatcagactctctcattgctttcaccactatagtatttttcatttatcccactccattcctattcttaagtattgtatattattatgttgcaaaaatacttcttcttcatcaataattctaaaaatattgctagaattttagccataatcgtgaattgtgaaatgttcattgtaaacttcaacatatatttaatagtaacactctattattttattggatacataaatattataaatattgttatatatttatatagatgaattaattataagttagataatatctcacaactagaaataagcaagggtttaaatccaaataatattttgatcctatttatctaatacaataacactttaacttgtataagctaaagctaaaaaatgctttttacatagcttaatcgccacgtaaaaagcatttttattatgttgaattcattgatagtttagtatctgaaatatctatctacagatatttagaaacctaaatttgtaattcttattattaatttatcttaaatctagctaattcttctcctaacatttccgaaagtgattgaagttcctcagcatgcttagtgaatctaaccatagcagcatctatctcttctgttgatgcgctaacttcctctgatgcagctgcagtttcttgtgatattgatgaaatattttcgatttccactattacactttgtttacttctatttatatcaattacagatgcttttacttcattaactttagcactcattactccaattgattctattatctcgttaaatatctccagtgtcttacttactgctaactcctgttcttttgctatattttcagcagctataatagcccccgttgctttatctgacttatttcttatatttacaataatctcctttatttcttcagtagatactttagattgttctgcaagttttcttatttcctcagctacaacagcaaatccttttcccgcttcacccgcacgagctgactctatgcttgcatttaatgataagaggtttgtctgttctgttatttgagatattttttcagatatagtatctattgttttagtattttcagccatttcttgaactataccattaacttcatccgtagcagttttagtcttatctgatttttctatcaaagtatcaatcatagataatccttttgctcctaattccttcgtatttgcagaaagtttgtccatttcatgtgaattttcattaatttcatccaatttacctgatagctcattcatttctaaaaccccatgctgggcattttgtgactgattaaccgcaccatgtgaaacgtcttctattgattttgagacttcctctattgatgccgttacctcttccgacatatttgctaggtttgacgatgtctctaatactattttagatgatgctgtaacattttctataagctttgatatattagatatcatagcattaaaggattgtgaaagctccataaattcatcctttgtagataaatttatcgatgcagttaaatctccctttgaagctttttcaaatacttcttttagctttttaatattttgtgctatacctttacttaagaataatgatagcattatacaaattattaatataactaaagatatgtatactgttgtcgcaagtattgaattggtatcattagttacttccttctcatcaagagtagctacgaccttccatccagtagtagggtttgtcccatatactccaaatttctttgtattattaaattcatatgtcaaaaatcctgcattattattttttacatcttgccaaaatggctgcttagacgctacatctgtaccaattaaatctttattcttatgcgctatcatattttgaccatctatatctgaaacaaatatatatccagtattccctattttcttagttgatatcttttctgtaattgcatctaaagatacgttcattgcacataccccaactaattttccatccttttctactgccttagctatagatacaacattttttccagtctgggcacttttgaatggtaaagttattataacttggtctttatgttctattgcttgtttataccaatccctatcactagccttatatccatctggcattttctcactaggatatatttcaaatttatcatctacacttgcaaaatatgtactaaagatatcgttatcactttccttgacatcttttaacatactagttatagctaagtatgattcatctttatcagaattaacaaaattataattagttgataatgctttagtcatgcttacaaacccactgaaatagttatcaattccatcatttaattctaaaagagtttgttgacttgtaagtttcaatttttgattaaggatggatttagcttgttcattggcaccaaatccaagaattatcaaaggaattaagcatattcctaataaactcataacaagcttggttctaatactttttagtttaattttctttaacttcattattatttcccctttatcgtaagtatattaaatatttataagtaattattttgcaaaattttattgtaaagtagaattcttgtatcataaaaacaaaaaagtctcatttcataaaacaagactttattataattttaattatattaacttttaccatgatttaatcacattaccattatatatgcgatgtcttttactgtcaatacttattatttttatcgaaaattgttatattcgacaatactgacttgtcgataaaaagtttgctgtaaattaccaagtgtttttaatatatatatgttgtaattcacaattagggctaaaactcttgcaatatttttagagttataatgaagaattatttttgcaatatatattaaaaaagtttaatttattaaagtttctcttaaaactattaggcaatacaaaacaaataattttataaaagaatggactatatcgtttaaaacctatataatatgagattcaagcattaaatccgagaaataaatctcttacataaactctcagcaatttaatatactataattagtgtattttatgttagtctatcaaatttcacataaagcattaattatatgcttttacataaatattaaataaggaggattatatatgtttacttatatcttaatattattaatttgcattttactatcaactataataagtagatttataccttccttatcagttcctattgtacaaattgcaattggatcactaatcgcaataatacactcagaatttagcattgagctagatcctcatacatttttagtaatgtttattgctccccttcttttccgtgatggaaaaaatgcagataaaagatctctatggaaacagaggagaaatatacttttaatggcactagctttagttatcgcaacagtaatattagttggattcattataaataagttaattccatctatttcgttgccttcagcttttgcacttgcagctgctttatctccaactgattatgttgcggttagcgtactttcaaaaaaaatctcacttccaaggaaagtgcttcatcttatcgaaggcgaaggacttatgaatgacgcatcaggccttgtatcttttaaatttgcattagctgcagcactaactggaacattctcattattcgatgcaactatgagttttttcatagtatctatagggggaataattgcaggattcgttttagagaatattctaattaaatttgaattttggataagaagtcttggaatggaggatattacagttgaaatactacttcaaattctaacaccatttataatatatcttgtatcagaggaagtatttaaagtctcaggtatattagctgtggttgtagctggaatggtatactcactatcatctaaaaggttaaaatttaaaaatgctaagctaaatgcagtctcagaaaatacttggtcagttttagcttacgttttaaatggtcttatatttataatagttggattacagctaccaaatataattaaaatcgctttttatgaagccacaataaataattttcaagctattattgatgttttattaatcacactagccttatttacacttagatatttatgggttctatttatgtataagtttggagatagctcctgcaagacagaggaaaaaaatgttaagtttcacgctgcgctccttacttctttatcaggagtaagaggagctgtcacattagccacagttctttcgattcctttgacattagaaaatggtgaaccatttccagaaagaacattaattttatttttatccgttggggtaattctaactacacttcttattacaactttcatattacccctatttgctaacaaaaatatccctaaagagaccgattatttacagataatgaataaggcacagataaaagtttgggctaacactataaataaattaaaattagaaattgataataaaaagtacattaatatgattataagcgagtataaatatcgcattcatcaattaaaacgtggaaattcttattataagaactggaacaggagcagtaaggaggaaaagaaatggatgcttatatgttttaaaaaagaaattgaaaataccagaaagatgttacaagaaaataagatagatgaatcaactgcatatttttatgaaaaatcagttagaaataaaattaaattaatgtcatcagttgaaggtttttcgttgattttcaaagaggctttaatgcgaatttcttctttaatttttaatattaaaaaacttagatatatattaagaagaattgaaaacaaaaaaagaagtgaacaacaattaaaagatttggccatgaaagacctttattctactaatgcagaatacttaattcaatatgttaaatctatcattactcctgaaaatgaagaaacgctaaagaaaataattttatattatcaaggtgtctattgggttgcaagcaaaccaatcttaggaaaagctagcaagtatgaaaagaaaaaaattcaaattaaagcaatgcaactagaaagaaatactatacaatctttatttgaaaatggagatataacttggaatatagcatctgaactaaggaaaaatctaaattatattgaaagtgatgttttaagataataggcttttatttttataagcctattttttattttctagaaattaatatttaagttaaatctatgataagttagtttagagactaattctgaaatctacggttccacagtctcctacgatttttttatgttattttatatttagtgcctcacttctaattctaaaaaatactttccatatagtataaaattttcattgagagataatctaatattaaatattataatttgacaagtatgcaaggagaattaaaatgaaaatattaaaaaagatactgtctcttactttcatatctatatttttattatatagtactagccaaacttcatatgccagcccggatattagttctcagactccacttaaagtaggtgtattcttaaatagttttagtgatctatttatttctaacgtaaagaaaaacttagaggatattcaaaaacaaaatgaaaataaagttcaatttactttttttaatgccaatggaaatcaagttattcaaaatgaagatgttgacaaagcactcaatgataattttaatcttcttgtattaaatcccgtcagcactaatattgatcagcttcaagatactcttaataaagtagcacaaaagaacattccattaattttatactatgcaaaaactaaaccaatagtaaattttataaaaaattatcataattctgttattattgatacagatgttgatcagtctggaattattcaaggcaaaatcatagtagatacatggaatgctaataaagaaaaattagataaaaataaagataatataattcaatacattatgttaaagggcccatctaatagtccggaaacaattgaaagaactaaatattctatattaacaattaatgaatcgggaataaaaactcaagagcttttatcaataccttgcaattgggaagaggaatgtggtagaacttcaatggaatcaactttattaacacttgatggtaaaattgaagcaataatttctaataatgatgctatggcaataggtgccattaaaacgctccaaaaatatggttataataaaggttataactcaagaaatattccgattgttggtattgatggtttgccaaaagctcaagaattaattaatcaaggtattatgacaggtactgttgtacaagattcacgtgctcatgctaatgcaatttatacaataggaatgaatctaatttctggcaacactcctcttaatggtacaaattataaatttgatgaaagtggagttacaattaacatcccttatcaggaatataaaccacaaaagcagtagctgaattgcctagctactgcttataaaattattccctagttttttcttccatgaattctattattgaggctcatagtaaataaaaatactaaatataacttctattttatacagaataactctaagcccgtattctgagtgcatattcttcagaatctatatggtaatatggttcaaaatatatattctgaaccatatttgttaaggtgttaagaattgcatgcagtttaaatttttgctttacaaaatcactatatataatatatctttagatttaaaaccatctttttatgtatcttatccttggaattcaccattagaaaactgcccttgattttttgttccatttaccaaagttaatatgcctgtcccatcttctctaccatgtttaaactcgccttcatatttattaccattagcataaattaatgttcccatcccattcatttctccatctttacactcaccttcgtattttgcaccatttgcgtaattgaatgtacctcttccttctattttatcatttacaaatttgcctttatagatattaccagtagaataagtgagttccccattgccttctattttgccatttttaaattcacctacatatacatcaccatctgcatatgcatacatacctcttccttccattagtccattcttatatgagccttcatatctatcgccattaggactagagtatatacctttgccttccatttcatcatttacaaactcacctatatatttgccaccatttaaataagttaatgttccttttccttctcttttattatttttaaattcacccacatatacatcgccatttgcataagtatatgtacctactccgtccttcttctcactctttatctgtccaacgtatttgtccccattagaataatcaatagtcttttctttattagaatcacatgaaataagtaaccctgaactaagtacaagcaaaattccacttattataatggcagaataattttttttattaaaaacattacttttcattttattactccttttttcaataagtctcaattttatttcccatattttttacattaataatattataacatactatactgacattttgagctctaacttgaatgtctatattacatttaagtttctatactaatatccataaattgtgcattaactagttcttttaatagatctctatgtatcccatgattttcaaatatacagtacaaaaaaattggaactaaattttacaaaaaatatatagtttttagcataatataacatattttttaattgtttcttgattgaaaattttattattgatataataaggaattataaaaaagtactaaatcaatctgcctatatattttgtacttgctattttctttcatattactaaagccaattttaataaaataaatttactcaatatatacctaaaaagccatattatgaatatatataaaaacataatttaaaattgaggctatttgcattgaggattttttaacattatggaggtaataaaatgacatatatagctattcttttggttgtattaaaatctcacccagtgctgagtatttggggatgcattctttttggtatcattagtcagtttgctttccacaaaaaagccagattccatttagcaaaattttctataatcttttttgtgattattattgctaatatttttgtaggacattttttcaccaatatcattattgacaattttggtgaaaaaggagaagccatgatcttagataattcaccaacatcagaccaatataataatgaaagagtctatcgttataatgttctgattagacctgagaatgatggcaatgctatttcaacttactttttatcatcggattttaatattgttcataatgattcacttaatagatactactatccttcaactggagtcaagttcaatgtaaagtatataaaagcttatccaaaagcttttgttattatagcaaatgatgatagtgaatatggcagacaacttgagattaataagtattcatcagagaaatctaagatagaaaatcaattaaagatggaccctgaaaaccctgatcttaaagaaaagcttaaggaattggacaataaaattcaatctattattgatagcaatagtagtaatactagtgaaaatgcaaaaaaacttcagcttaacaattatttatcagaaaaatctaatattgaaaaccaattaaaacttgattctgaaaaccctactctcaagaaaaaacttgaagagttaaacataaaaattctttctattaataacagtaatttttctggagaattaatcgctatattcggcgggaaaggtacagattctgggaaactgaatgatgcaagatatattacagtagattctgataataatgtttggatcgcagattataccgatgggcggattcagcaatttaataactctggtgaattcattaaaatgattcaaataaatggagataaaaatgattctaaactgattaaaggactagctgcagatatgaacggaaatttatacgtctcttctggcagcactattcaaaaatacaaaacagctgatggtagtttatctgaaacttttaagggaaatgattattatggtcctttagcagttgataaggataataatatatatttgctaacttcttcagcaacagaaaacacattatttaagttaaactctgatggagcaatacttgctctttttaataatattataaaaaaagctaataaggatgatccaggtatgaatgctgatttggcattagatagttctagtaatatctatatctttagtgaatatagcaaaaagatacatgtatataattctaatggagatttcattaaatatttagatttaaagcttaataatcaagatatcaacattgagacaatttctatagataatagcgataatttatatgtaaaaagttttaatggaaattataaatttgaccttaatggcaatttacttaacattttacctgataaaaattactatagtactgatgtggattcgaacggaaatatttatatgtcagataatgatgatatatttgaatataatctaaataatcctacacaggaataaaggattgactggccagaatgctctttaagtaatttttaattatctttaatgaatatttctcaatgttctgcaaataatataattgttcagactcaaacacaaaaagagatagcaattcccccattctccctgctatctcttttctatatattaaattctattttttatcttaattccccaaacaattcaaagctttgctttccattaaatgaatttgaataatctcttttatctttcactttataaacttatatttccattcatatcttctgttccttgtgattctttagaatgaatcttttttctaaactttcttttcaaatcatcaaaaactgtatacatgattggtactacaaataatgttaaaattgtagaagtaactagtccaccaattacggcttctgccattggtgcacgcatttcagaacccatacccttagatatggcaagaggaatcatcccaaagatcatggctaaagttgtcataactattggtcgcaatcttattaaccctgattgcttgatagcctcttctctttccataccttcattaattctttgtttagctgcatctataagcaatattccgttctttgcaactaagcccataagcattattatacctattattgacattaaacttaattgagttttgcaaacaaataaacctaaaacagctccaattattgcaagtggcaaagagaataatatagatataggatcaacaaagctttcaaactgtgctgccataactaaatataagaataatgcagccatagccattgcctgttctaaacttgcaaggctgcttgtcatagatcccccagctcctcctaaagataccgaaataccttctggcatattcatttgagtttgaatctttttcatgaaagtattcatgaaagtacctgaagctgaacccgaaatattacaagagatctgcaattctgcaagtctatcatatctagtcaattgtgctgacgctgtttcaaaaacctcatctgttacttctgatagaggaacgagcttattatttgaacctgaaacataaacttgtttaagattatcaagacttgcacgttgatctttttgtaaatataatactacgttatctctattttttccatcatcatacttagttacagtcgtaccactaaataaagtctttaatgtagttgcagcatctaaactgcttactcctaaatctgccgctttatcacgattcacttctaaagctatttctggaagacctgatttatcattactacttatttctcttaccccaggctctttggccaattcttcttttactttttgtccaaaagcttgaagctcttccctattgtctccaacaagttcaaatgttgcatcttttgatgatcttccaccacttgccatagaggcagctgctactgacacttgtgctcctggtatgttctgtagatttccactaagttttctagcaaaatctcttgaattttctttacgtttgtttttgtctgttagttctattttaattgatgaactattttttgaaacagtagtatacataccactgacctctggatatttcttaataatactttcaatttgtttagctttttctgatgcattatctaatgttatacctgaatcaaaatttgcacttacagtcacttgattattatctgttgatggcatcatagtaaatccaagagatgaaataagtgtaagacttcctgcaaacataactcctgcaactattataattaccaatctatgatgaagagacataactaaaagccttgaatacttatgcgctaagatatcaaacttactattaaatcccttaaagaatttgctaagaatattttctttcttatttctttttagtcttagcattttagatgacagcataggcacaagagtgaaggatataaataatgaaactgccatactaaatacaactgtaagtccaaattgaaagaagtatcttccaattgttccacttaccattgatactggtaagaatacagagataacagctgatgttgtagctattacggcaaagcctatttcagaagtggcttctctagctgcttctcttggtgattttcccatatgcaaatgccgcacaatgttttctataacaactatagcatcatctattaaaagtcctactgcaactgataatgccattaaagtcattgtatttagagaaaaagcttttactttcatgcaaacaaaagttgttattattgaaattggaagtgttgttgcacttataagggtactttcccattcatttaaaaataagaatactatgacaactgctagtatacaaccatccctcatagtttctaagacactatctatagtgctttgtattgatactgagtcatcacttacaatatcaacatgtaccccttttggtaaagaggatttaagcttagtcaatgtcttttttacatcatctgccaattgaacagtatttgaaccagattgcttaactatatcaataccaattgctggctttccatcgtaatatgcataactgcttctatctgcaactccgtcctcaacctctgcaatatcttttactctaatttctgtaccatttttattagctattaaaatattcttaaaatcatctactttttttatcttactgcttattttaacagaaatttcattatctttatcggtgattttacctgtagattggtctacattatcttttttaatagcatttgatacatcagttgttgcaagtccatactttaaaagcttattattatctaactttatatggatttcccttgtatcttcaccagatatatttactgagccaataccagacactgtgtatagtttcttttcaatattatcaacaacatctgataattgttgattatcatctagtccataaacagcaacagataaaattgatgttgctgatgaatcgaatttagaaataatcggtgtatctatgtcacttggtaaccccctaatacttgaaactttatctctaacttcttgcgctgcaacttctggatctttatctaaatcgaattgtatattagtccttgaacttccttctgttacagttgatgttatatgactaactcctgaaatttttccaactgcatcttctacaggttttgtaacatttgtctctatatctgctggagatcctcctgtttctgtaatcgaaactgaaactgaagcattctcagcttctggcatgtcattaacaactaatctttcataacataccatacccacaatcgcaaaaactaacatgataactgtgataaatactggtcttttaatactaacatttgctatattcacctatggtccctcctacttagaagttgtgtcttctgtgctgtcatcttgctttactactgcatctacttcactaccgtcttgcagtgtacttgtatttgaacagattatttgatcgccatctttaatgccagaagtcatttctacattattaccattagtttccccgatagtaactttagttttcttagccgttccattatcattaataaaaacataatattccccttcatttcctaccaaagcattaactggtacagtgattatttcattgttttgatcacttacaagcgtcacctttccataaatacctggcaataaagacttatcactgttatctattttaactttgcagttaaatacccttgaagttggatcagctgctgcatcaatagtttgtattgttccattatgagtttggtcacttccttcaactataacggtagctccctgtcctatttttacttcacttattttttcttgtggtacctgtattgttgcatatacggatgatacatcattaacaattgcaagggctgtacctgtagatgccatttgcccaatattcatacttttaccacttattactccacttatcggtgctttaattactatgttagctaaatcactttggtttttagctaaagctaccttctgtgcttctaaatttgcttttgatgtttcaatacttgcctgtgaactttgaatacttgcatttcctgaatcataatcagccttagctgagtttaaagttttttccgctgcttgaagatctgtttgtgatatggctccaccatcaaataatgttttttgtctttcgtaattacgctgagcatcatctaaattaattttatatttttccagggctgcctgggatacatttaatgattgctcagctacttctacttgtttctcatttacagctatttgagcttgtgcagtctttatactattttgtatatcttggtcatctaaagttgctattgtatcacctgcatttacatattgtccgttttcaactaatacagaaacaattttcgctgctattttactcgtcactgtaccttgttgaacagcctctaaactagccttgtatgtatctcctgtatttttttctactgttttagctgtctgtacttctactgatgttttgcttgcaactgcttgagtcggtttgccttttgcacttgctgataacatacttttaagtgcaatcgcccctcctaccacaactgcgataatcacagcatacacaactattttttttacgtttttcattttgatcctcctctatttgcaacatcatatattccttttcttatataattatttctacatcttcttttgcttccactcctcttaaacgctcctataggataattttcatttttgctcatgtttattaaacttccgagaatttaacatttaacttatccgtaactcttagaagcataatttttatctaatcccattgtcattagttatattttatatttccatattatgtagaacactattaatctgggcatctatgtatattttttcatatctttataaacaatttctaaacttttttagattttaaaatataatctgaaactaacgatataatttcaaagataaaaacataagtggctacgcaacacactctcttgataacttttttacaagttagcctcatcttatttatctatttatttatataactgcctttgagaatgcaaaagtttcgctcctttctagtattataaatactagaaaataaaaagatcttagattaataaatttattattagcctaagatcttttcttaattttatagatatataatttaaacattcaaattttcaaataaacatatttacaaatttgtcaaaacttcaaccttacatatttattagaaattataacttaaatataagtaatattgcttatcccatttgtgatatttttaataacgaactataatttaaatctgtatcccgcgccccacacagtctcaataaattgaggattactactatcttcctcaattttatctcttattctattaatatgcacagtaacagttgcaacatcagcaaaggaatccatgccccaaattctatctaaaagaattgtttttgaaaatacgatattagagtttgttgctaaaaatagcagaagttcaaattctttgttagccaatttaacttctttatcagcaacatatacccttctttcccttttcaatatttttaatcgtttaaacaccatgactccattatttatattatcttttttccccattgaagttaatctatcatagcgtgaaagatgtgcatttactctagcgacaagctcacttgggtcaaaaggcttgacaatataatcatccgctccaagattaaaaccttttattttatctaccgaatcctttttagctgtaaccattagtataggtatctctttattacttcttatctctttacaaagctgaaacccatctttacttggaagcattaaatcaagcagtattaaatcaaattctctattcaatgcgaaatttaatccgtcttctccattaaaggcaatttcagttttaaatccgcttacctcaagataatctctttctagttctgcaatcaatttatcatcttctattatcaatatttttcgcatcttcttttctcccattatgtttatatgcaattaagcctgataaacaatataatttttcttataacagtcaatatacgaatttaaagcaatacaattcattttttatcgtttagtacacaattccttctagcttaagatatatttttataaattaaactttttagagtatatatgctaaattttcttattaatcggcaaagttataataatggctaatccattgtcattttcagcagtaattgtgccattatgagcttttattatatattcgcaaattgaaagcccaagtccacttccttcacttgaattggctctcgattggtcttccctataaaaactagcaaatagttttgacaaattttcttctaaaacccctggtccatcgtcctttatttttaaaacaacgctgtcttccacttcttctatggtaatatctaccttaccatattctttcactttgtattttacactattctcgagtatatttgtaagcactcttcgaatttcttcaaaatccattctaataaaaatattatctttacaattatttttataagttaaatcaagccccttacctctaaattctagtatagcattgctaaaaaaatctaaaaagaactcattacaatttatattttcaaagttaaaaggaaattttccagtatctaatttggaaaagaaaaataatttatctacaagcttgtccatatcacaagttttactatatataatttcataatatctttcacgtttttcatctgtatttgcaattccatcctttaatccttttgaatatcctttaattgttgttaatggtgtacgtaaatcatgagatattcctgcgaccaattcctttctattttgctcatattttagctgcatatcaattgattctttaagccttactctcattttatcaaaatccctacagacttttgcaaattcatctgtcccttgataactcagcttaaaatcaaggttcccttcttctatttgtcccgcaccatagcttagtagctctaaaggtttaatcaaacttttagctactcgtgacgataatatcccattagttaaaataattataagcagcgctactatgaatacaacccccatgtaacttaatagaaatgttcttgcctctgctttcatttgctgtctgctcattaaattattatttgattttacagcaagcatattaatattttttccatctttagttaaactatttttaactaaactaatagaattaacctcaaggactattgaatctgaagatgtaagaacgtcacgttcaagcctagacatagcaactttatcagcatcagttatattagaaaatatcgtatcaccgtcacttgtgattataaaatcataaccggcatttttaagatcttccttcgtcttgttataatcattaattttatcataattattcctaatttctttattatacataaataaagttttctgaataaatgatattccactatcctcttcaaaaacttttattttcttaccatatatctctgtaaatccttctagaactccaactgcaataactactatcaatattgctggaactatcaacataaaaagatttgacatagccagccgtttttttatcatcataattacaatatctccttctaatttctctgttaatcaaatactttcgctaaaatatgccccacaaaatggctaatttttagcttactctcacaaattaacataattataatataaaataccactttattcatcgttaatcaatgctagtattttaataattcaatcattctaaactaacctatcaataacttcacaaccaatatgtccacttataataatatggcctactgctactataaaactactcatttttacacatctgctccttatatgtataaattttcactttatctaggcatgagatgaaagtataacagctccaaggtcaatctttaccttagagctgttattattaatgtattaataaatttcatgaaaaatacgcttacaattataactgcatatttattaattctatatcattatgacaattaatgattttattcgtaaaatacctcattaagtcgtttttatcattctaccactgctgcatctgtttcttcttgtttgccttgttttaataaaagtgttggaattattacaatagcagttatgattgaaattataaacattgtctcattaagtgcttgaagctgtgcctgacttgcaacttcgccaaaaatcttacttaaagcaattcctttagcatcactgcctgatatcccccccttaataagtgcaccttgaagcatttcaaataacttcatgctatttttattaaaagatgtcacttgtgaagctaagttagaataatcaaccacatttctatgctgcataatacttgtaataattgtgacacctatagaagtccctacctgctttactgtattagttaaagcagatgcatttgacattgctgcctttggtaatccactaaaacctactgtttgaactggtgccataagaaatcccacaccaaagcctctaatcattaatagaatcgtaatatctatattaggtgtatccaacgtaatttttgacatgctatagctgttaattcctatcaaaaccaatgcaaatacagcaaataatctaacgtcaaatttattaccaattttcccatataaaatcatagatatagctgttgctattgcttctggaaataaaatcaagcctgtactcattgaatcaagtccccttatttgttgaagaaatattggcataagaaacacaccaccataaagagctaacattgcaatattcatgataatattactcatacaaaaagtgtaattctttaaaagttttaaatcaagcataggttcttcaatgagtaattcattcacaacaaatatgataagactgtagcccccaacaatcataagcactatattttttatatcgttccagtccaaatcacttttcccaagtacatagagaacgcaggacattccaatactcgaagtcaaaaatccaataatatcgaatttctttgaggacgtatgttctgatttcttaaatataagtatagccattattatggcaactatcccaactggaagatttataaaaaaaagaaatctccaattgaaattttgaataatatatccacctaaacttggtcctaaagctggagcagccattacacacattcccattaaccctatagccattccaatttcacttttatcaaaagtagtcattaatatcgtcataccaagcgatattatgcaagcccctccaattccttgaattactcttgcaattatcattatattctcattccatgaaataccgcataatagtgaacctaaagtaaataaaattaatgccataacaaatacgcttttagtgccaaatttatctccaaaataacttgttgagggaattacaactcctaaggttagggtatatgaactaacaacccattgtatttgatctattgatgcgttaaatgtctgcatcattttagtaatagagatattaataatactggtatctagatttaccataaaaattgccataattacaacgctcataataagccatttagatgaagattcttttttattttccatacttccacctactttatatgtatttttatacctgcatttgtaccaggtagaagattagcatcatttttctcaaattcaatttttacaggtaccttttgaacaaccttagtgaaagttccaccagaggaggatggtagaagtgaaaatgctgaatttgaagcttttcctatatactcaactttacctttaaatgatttcccttcaaattgatcaatttttatatctacactttgtccttcatgtaatttttcaaccttgatttcttctatattagcagttatataaagcttttctgggtcaatcattactgcaagtgtcgatccagccgaaacatattgtccctcctcagtttcctttttaataattatcccattagttggtgctctaagtaacgctgaatcaatattagcatctgctaagccattagtatctagacgacctaaaatttgatcttttacatctttatccccttcttttgcattaaattcaagaagtttacctgatacttgcggagttatgctgataaaatctccgtcaacctttgcatcttctgttgaaacaaagttttcattgttataccagtaataaaaacctactccaccaagggtaattaacattgcacataatattaataaaattattgttttacgtttttctttcatccctgtcatcctttcttagccttttataccaacttcagcaaacatgcctggtttcaattgcccctttgaatctgttaaaactattttaactaaaacattggagttttgagagtttaatgttgaatttattactgatatggttccttcaaattctgaatcttctatttcggatactttaacttctacagcttgtccttcttccaaatcttttacaagccttagaggtgcatatgcattcacacacaaagcatctggattagatattgaaataagtgtgcttccaggtgctgccatttcgcctttatttatattcttaacagtaactttacctgaaataggcgctgtaatgcttccattatttaatgccacctgcgctgttttcactgcctcttcagcttgatgtacttgagccttgtaaacatctatacttgtttctgtagcaccatttttaagcatttctaattgttcttctgcagacttttgtcctgactcagctgaggtaagttgctgctgtgcagtttcaagctgcacctctgtagctgcgctagcatcaaataaagcttttgtacgatcataattctttttagcaacatcataggttgctttagcgctatccaaagctgcttgcgcttgtgatatttgttcaggctgagtgctattcatagcattattcaaatttgcatttgcagtatttactgctgcttgtgcctgatctacctgtgcttgaagatcctgagtatctaatttaatcacggcatcaccttgatttacagttgatcctacattaactaatacatctgaaactctagcagaaatctttgaagatacattaacttgattatcagtctcaatccttccagccataagatatatggaattttgcttattaacctcttctacttgaatagcattttcattcttattattttttacagcgcatcccgtaaaaagagaggttcctataagcgttgataatataattagcaatacatatttcttcataaattaattactcctttaacaaactaatctattttatgccttcatctgaaattacatctcgtaggtcattaggttttataatttcaaagattggatctaaaaccttaaataaagctattaaatcttctcttaatgaaccatgattagcgatttctaattctatcgatagtgcttgctggcttataacagcaagtataagataacatttttgtggccatcggagataaatcgccactctactaatccaattaataatctagaatttacaaaatctaaatactacgaatgttatacttcttttaaggtacacgagtaccttaaaagaagtataacattggaaattacaaaatgcaatactaaatattagcattaataaatcataaatatctctgaaacttcggaatccttaatagatgtaagttctaccattttctttttaatgtgcatattctcaagaatatatattttttagaatattaccatattggttctagtattctgtccctatgccaagaactataaaaaaaatacctatagaccaaacactttcttcatgtgtcttgttcataggtatagttttaaattatctttttgattttgttgaaatttcgacatttagctttcttccagcaaatttctttccagtgcaatgcttcattatggattccgctgcagcctctgttacatttacaaatgaaaacttttcaagaatatcaatatctccgacatcttctctttttacctttgcattctcattaaagaaatccactagcttccttggattaatcttatccaagcgtcctacattcaaaaacagtctcttgtaatctgtcttcgaacctatttcattttcagtatagtcatagttcacttctttactatataccatatccattaatgccgctgctacttctacgaggttaaactcttcatcaagttctgttgccattggtataaatttcttatagctatcctgctccaaagtttcctttatctttgaaaacatatttttgtactttgaaacaaatatttcatcaacagtaggaatttctcttcttcttatcttgctttttgtaaccttttcaatatgtttaagagacatatattcccttgcagtaaccaatgtgtaagcaacaccttttctatttgctctacctgttctgcctattctgtgaacataggattctacgtcctgaggcaaatcgtaatttattacgtgagttacattttcaacatctatgcctcttgcagcaacatcagttgctatcagaaattctaaacttccttctttaaattttcttaaggtatttattctctgattttgattcatatctccatgcattccttcagcagtataccctcttccctggagaccttctaccagttcatcaacattccttttggtcttgcaaaagattattgcagaagtaggttcatcaacatccagtattctgcatagtgtttcaaacctatccttgtttttaatttcataatagtattgatccactgtagctacagtcattgcattttttaaaatggctatgtgtttcgtttcagacttcatatatcttttagcaagtcttttgatttcttcaggcatagtagctgaaaacaacattgtctgcctgtcttgatttgaattttttattatttcttctatatcatcaataaatcccatgtttagcatttcgtcagcctcatccaatacaaggaatttgatagaacctaaattcaagacttttcttcttattaaatccaacactctacccggagttcctactactatatctattcccctgcgtaaagctgaaatctgcctgtcaataggttgcccaccgtatacaggaagtaacttaatcttagtaaacttagctatacgatttagttcatcatttacctgtatagcaagctctcttgtaggagttagtatgatactgcttatcttcccctctgagcttctaattctgctcaaaactggtgctccaaatgccagtgtctttccagttccagtttgtgcctgcccaataacatcatggccttctagaagaactggtattacctcagcctgaatcttagatggttcttcaaatcccattgcatcaatagctttaagaatattctcatcaagacccaattcgctaaatactttattttccacattaaaccttctttctgtttttttatagtatttgtaaatttaataaatttatttcaatgaaaaaccaccttaaacaaggtggcaaaattagctaatatattgttaagcaacatacaaaagttattttatactctttgaatattagttgcttgagggccttttgtacctttttcaacatcaaactgaactttatcgccttcttgtatactaaatcctgaaagagaagatgaatgtacaaacacatccttttccccctctacctctataaacccaaatcctttttccgaattaaaaaactttactgtacctgttttcataaatatcctccttaataaaatattgtattttgacttgttaagcattaccacttttaaaaataggtgataatttattatttatctagacctatttttctcattattaagtattcccataatttcataaacaatactttttaaagagcaaaataaactatgccttcttattaatgttgtattttcattgatttgattttttaattatctccaaatcttatatcttgattatattatacacttaattcgtttgtaatttccagttatatttttaattaatgaatatattgtaatattctactaagaatatagtaaattatctattggatttatttaaaaactatgcatttttttcttatgaaaatctctttcaaaatgccctatcatattcgcaacagtattttcactctttttaatcatcacaggtgaatatttaaaaagtttttcattcccatatatttcaaaatttcatcaaggtcagtatcaacaatttttcttagtgttatttcatcatctgcaatatgtggaaattgttcatatggatttttattcaaattattcccaccctcccatattaggtgtgaattttatattttccatttacaaagtagccctaattttcatatccataagattttctaattagatcgaaatgttcttgcatagcattgtaagctagtgattcatcccttttctttaaatttcttaataaattctcatgtatccataataagctttcttttgtatttccctcatgaaaaatttgcattctagcattccgtatgaattcgtctacaagttgagatataacattaagtacattaattaataatacatttcttgaagcctttgcaattaattgatggaacttaatatctaattcaacactttcttcttcattactagcaatatacatcttgtccaataattctgttaagagttcaagctcactatcttctatatttttagccgctaatttagagcattgaagttctagcgtttcccttaaatcatacatttcttttggcgaactctcctgtagcataaacattattgaaagaggttcaagcaacgagttattaaaatttgttcgtatataatttcctgctccatgtctgctttctattaatcctatgacttctaaagctctcatcgcttccctcacagatgcacgcgatacctcaagagattctgccatctctctttccgtaggtaatttatctccctttttcatttctccatattttattttatccttaattttctctatcacttgatcatatacttttggatttttattaggtacaagcatatgttatgtatcctccttttttgttcatattttttaatttattatacatcaattttccgaatgctatgttatgttttttaagctttatgtataatatcttctaatatatttataaagcataccaagattcaccgtattctaatattcttctatagtcgtattcttcagaatatttattctttatcttatagtgatgtttcccataaagtttcttaaaatggaatttgtaccatttttaactgttaaaaagagataacattcttattagaaaaattatctcttttttaaaaaatcacattattagttttcatctattcaattggtcttggttgctttacctaagcttgcgctaaagaatttatttctaacaaactttaatttattttgacttaagattagaatcctttctaatgtttcaatactaaccttatttttttgcttgtctctcttcaagcttagtattaactaaagaatacataactggtactactataaatgtaagaaaagtagctgatgcaagtccaaatattatagttacagacattggcccaaataatgtactattagaaagtgcaagtggtacgagcccagtaatagttgcagtagaacttaatattataggtctaaatcttagacttacggcatgtatacaagcttcatctatagaaaggccttcatgtctgccctcaattatatattctacaagcagaattgcatttcttataactactccaattaaacttattattcccataacagcagttaatgatagtggcatatcacacatcaaaagccccattattactcctattaatgatagtggcaatgaatagattattacaagtggctgaataaatgacttaaattgaacaaatagaattaaataaattattactataataagcacaccagcaatggcaagacttgtgaagtttgtttctatttgtttttgttctccatcataaataacatttacaccatttaagtccattttatttatttctgatttcactgtattttctatatcacctgagttatagcctgattttaaatcgctatatactgttacagtcttatctttcttataatgctttatttgatctaactcggaattaagatttatagatgctacttgtgataacaatatcttattatttgtaatacttgattttacttgtaaacttttcaaatcttctactgaagcaatattacttttgactaatatatcgtattcgcttccacttttcctatatacagaactactatatccttttaatgcaatgttcatttgtttcaaaatatcggactttaacaaaccatattgagatgctttcgtactatctatatttacttcatattcatatgtctttttagctgcatcatctcttacatttgtggttcctggtatattttttaatttttcttgtatttgctctgaagcagtataaattttatctaaatcatctcctgtaagccgcattctaacaagtgctcctattggatctgcttgttctaaaagtttaactgtagcagttccaccagatatttcattatctaattgagtttgcatatgttctacaaacttttctcttgtatcaaaagttttagtcttagatatatctaccttaaccataattcgtgctgtatcttttgatggtgctactgtaggcagtgtaatgtaaaaactaggcatgccaccacctatagctgaagtatatccagtaacttcttcttgagattttaaagcttcttctatttcctttactaaattctcagtgctattaatatcttcaactttttcattagaaacatctatataaataacatctttatctacataagggaaaaattgcgaacctaataaattcattaatcccattgatattacaaatacaagcaaagatcctataataatctttagtttatgcttaagtccataagtcaaaagcttatgaaaaaacttttcaattttattctccttttcagatattttacttttcttaaaaaataaagatgacattgcaggagttataaataatgctgatatatatgaacaagttatacaaatcattactacttgtggcagcgttcttataaattctcctactgctcccggtatgcttaaaagaggggcaaaagcaccaactataattaatgtggacgtaaatacaggtacaaataattttttaattcctttaaaggctgcctcatctccagacaatccctcatcaattccaacttgtacaacatcacctattacaattgcatcatctaccagtattcctagggctataataagtgccgtagttgatatttgatgcacttttatccctaaaatctccatagtaataaatgataaggcaatagagattggaattactgatgacaccactaatgcatttctaattcccattcctatcaatacggttataactacaagaattataccctcttcaagatttttcataaagaaagaaacagagttatctacatctttaggttggaacgtaacctcgtctatctttaaatcctgtggcaattgtttctttacttcttccaatttttttcttacatcatcgcctattaaaactatatttttattatcttgaaaatatcctgcaagtagtactgccttttctccattatctgtgaacttataagctgaatcgtcatcataatccatctttacagtagctatatccttgagcttcaaagtttgtccagtatccgaagatactcctacaattgtgttttctatatctttaagagatgtaaaatttccaggtgtctgcacttttattttttcagtctttaatcccaaagatccagaaggaatctctacattttgtgcctgtaatataccgcatacatcttcaagagaaatagaatatttatttattttgcttaaatctacgtcaacttttacttgtttatcctgttttccttttatatcaaatctagaaataccgctgacattacctaattgcttttttatatcatcagcataatttcctatttgctcgtaggaataattttcaccagatatacttaaaattatacctgcagtttcagtaagattggcatctattttactctcctcacagccatctggaagctcggactttaaatcttttatcttatctcttaatgtacgccacgctttatctttatcaacatcactatttaaataaacaatgactatagatgcactattttgagaataagattcggcataatcatacccatctatttcttcaaccttatcttcaattttttttgtaaccagactttctacatctttaggagaagctcctggataaatagttgtaatcattgctgctggagatgaaacatccggactttcctgtttaggaatataatagtaacaccctataccagtaattatagcaataaacactaaaaacaatactatctttttattttttatagcagcatttatcaatcccatgattgctcctcctttagtttactgaaacttgatatccagcttttatatttttcataccttcattgacaagattatctccactctttaacccttctacgcacacttgactttcattggtctgccctaaagttatatttttcctaacagcacgtccatcttctactacataaacataatcttgtccatcatttaaaatagttgaaattggaatccaaattccattcatttcaccttcattaatataaacttttgtagattgacctatataaaatttactattatctataggatttaaaagtttaatttctgcactatatgtccctgatttactatcagccatttgaactatattcataacttctgcatctgtggtaatatcatcaattttgacttgtgcttttattccaagttgtattttctttacatcttcatcggataatcctactgtaactacctgattttcacttctaattaatacagccggataaccagctgactgcatttctccttctttacaaagaatatctactacatatccatctacatcagctgtaagagaagcatcttgaagtaagttaaatttggactcatagtcagcctttgcagcatttaactgagccaatgctgcctgcttatcttcttcccttgttccattctgaagctgctttaatgtttccttagctccattaagctcactttcacttccatctaacttgattttaatatcattaacctgctgctgagtcactgcatgcatttcaaacaaactaacatttttgtcatataagtctttgcagtaattataattatcctgagcattctttactgatatctgagctttatttatatcctcagcctgagcaccgttgactgctttattatattgtgctgaagcagcatccatttgagactttgacccttccattgcaaaattcaaatcagttttatctaaatcgacaagcttgtctcctttttgtacatgttggccttttgaaatatatattttagatacttttgcagaactcttaaaagaaagttttctaacttcacttcctcctgtaagcccttcatattctaatgaaactggatatctttcatctttaagttccacagtttttactggatagatttttatatctgcctttgaattattctcactgcacccacttaatgtaattaaatttataagaattaaacaagtaactaatatttttttcattccatcttctccttttcagttcacaatttaagctctagagtaaaattgtgcattatacattagtttcccaatatccatggcttctcaatactatcccttaaattattatgagtataaattagttttcttaatgcagtatctaaatcttcgctttccacaatttgtttatcataatcattttcaagcattaatcccatgtctacttgtgcttttgcaaaactaagctttgtatttgttgagtaagcctgttcttttaaagtatcaattttattttctaaatcaagcagcgttgagtaactttcttttaatccatttttaagattcttttttgtatcatcaagtttaacctgtgctgtacctaaattatatttaccatctatatattctccataagcattaagcttagtataatattcttgctgcttctgctgataatctattaactttaatgcatacgagcctgaatcaaatgtagaagtaccatcagtatttgctgttataaatgaagatttatctggcattttttctacgtccttatccataatttcttttattccatcatcttttagctctttcatataatctttggtaagcttcaatatttcactatcatatttcacatacttatcaattttgtcatttatatactcatcaactgaaccatcaattttaaattttgtataatccacattgtaatcaagcgaatatgtatttttcaaatctaaatctgttagtactttgaaataatctttgttgttatttaatgaattctcttttgctgttatttcatcttgtaaggattttatgtcaatttgcgcatcgataaactgattagaagttgccattccaagtttcaactttcccttcataaaatccaaatctattttctttaattctagatttctttttaatttgtttatttcaatttcttttaaaatcatatcactatatttatttgtaatatcggaggctatttgatcttccatgaaagctttagattgctctgtctgcttttcttgtagttcaagcttgtcataaggataatcatatattttctgaccaatggcttcataataatcattagttttttcttgaagatcccttttatctttgtacatttttatttcatttgatttcaatgctaatttttcactgttacctatagctacattaattgctttatctaatgtaagaacttttttttctgaagaaacttgtatattctgatctaaactagaaatatttccatcctctccatatactaacgttgattttgatacatttaaatttccaatagtttctgatgctgatacaggtataatactgctaatcataacgattatcatactccctatagttattattctttttattttttgtttcattaacattcacctctctatttgcttacaaaaattcctattttatctacacatgtattttaaatctatatttgtatataatatttacaactgtatatttatactttatactgttgatataagcttatcaagaaacaatatttttgatttatatattacgtctacattttggaatatatgtagattattttattaggaggcacttatgaacaatggtataattaatgaaaatcttgatttaagagtacgaagaatgcataaactattattcgatgctttaatatctctgcttactgaaaaaaactttaatgacatccgcatttcagatatctgcgataaggctatgatacatagaactacgttttataaacattttgaagataaatttcaattacttgattttatgctcagacaattaatacaggattttgaaaaaaagagttctcaatatactcccatggatactcccaaagaatactacgcaaatttatttagacttctccttgagcacatgtgcgaaaacaaaaagatgtattctataggtctattaaataatggctccgcaatgaaacagcttcaaaaaatagtacttgaatgcataaagtcaaaattaataaatgaccaaaataacggagttaagtttattattccaatagatgttattgcagatttctattcacctgcattagtttattcagctggcgaatggcttgaagaaggtatgcctattccaattgatgaaatggtggattattgtaaaattatagctgatgcactacaagtaacacataaaaactaattcaaaaatttttatacctataaaataattttcacaagtttttactaaaattttagtttgggtaatacgtaatacaaaattataaatgatgaatatgtcaaaatacataaaaataagaaaataggatagtgtaacttaaaactaatataaatattgattttaagttacattatcctatactttttactatattaataatctcaactctttctattgacactttatttcgagtccaaggttgtactatttcatcttttcctaatactttagataatatattttgcaattgccatattcttaataataatatattttctgcatttacatcttattcaaatacgttgaattcatcacatataccatattaataaaacaaatatatggcatttgaatactagtttatattattctattcgtaatagtaatcactctaatgttgctgaatcccattagaactttcttcgctgtttcttacaaatatttcttttatccactgagcttgtctcttaaagttatgaatatctatttcttccattgcttctgcataataaagatttccacttgaagtttcatatccaatttaatttcatctctaatcatttttacaacacactccaataatttatttatagctttaaaatttaccaactgatattatgaacatatgttttgtactgttacataacattagatcaagtaatattttcgatagtaatatcattttaaccggcattttggatgcatattcttcagaatatttattctgaaatatattagaatacgcttcattttagaaaaacaaatctgaaacctatctaattcaattaataaattaaatactataatatcagcaaaacttggagttattatcgataataatgattctaataaagtggcttaaataaaggctataaacattgaaaattcaatgcttatagcctttagctttgtttgtagtttaatttctcatttttaaaatttataaatttaaatactattgtaccatatgttgcagctaaaattgatgcaatcataatacacatttttgcttcagataatatatttgcatctgcaaatgacaaggatgacacaaatattgacatagtaaatccaatgccaccaaaaacacttgcaccatataaatgtcttttggttacattagatggaaacttagctattttcaattttattaaaataaatgaagttccaaatataccaatttgctttcctacaaaaagaccaaatataattcctaatgaagctggtgaaaacaaactgcctgaaaaattatcagtattaattattatacctgcatttgcaaacgcaaatattggcataatcacaaagctagaccatggtgttaaaatatgttcgagtttatacaatattgaagttttaaatttatgaatattttctccaattggcaatgacatgcctagtaagactcctgcaattgttgcatgtataccggattttaaaagacaaatccatagaattatacctaaaataatataaatagatgtatatttaattttaaatttattagccaagataagcgtagcaaaaactattaatcctaataaaagcgctatccatgaaatttgactattataaaatattgctattactataatagcacccaaatcatcaactatagcgagtgcagtaagaaatacaactattccttttggagcattttttgcaactaaagaaagcattccaagtgcaaatgcaatatctgttgccatgggtatcccccatcctgtaatggttggctccttatagttaaataatgcataaataattgcaggcacaatcattcctcctatagctgcagatattggaagtattgtccttttaaaagattttagttccccaaacacaacctctctttttatttccataccaacaactaagaaaaatatagccatcaatccatcattaatccagtgaagaactgacattgataatgaaaacacaccatatccaatcgttatatttgtgtggaatatatgctcatagcctcctgaaaagctcgaatttgcaatcataattgctgcaatagcgcaaattaaaagaattataccactagaagactcactttttaaaaagtataagaatggacttaatattttagtttttattttatctttcattattaccctcctttttaatgcgatgctagctagaatattacttaaaaatgttttggctttattaaaaatctccataaaaaaagaggcggtaaaactcaaaaaagagcttcccaccccagaaactaattgcttgaaaacaaattatataatttgcccaaccgtatctaaccacattaattcattttatattatatattatattacacattaatttaataatcaagatttgctcaatgcgcttaatgactatttgctatattttttaaacaaatcatctagggcttctctaagaagaaatgcttcggttctatcatttgcttttgacaaccttgataatctatcaagttgagtcttagtgaaataattagattttagtaccatactctctgcttcagaaagacatactctattcttacctaattcttttgccctaaataatgcactatcagctactctaaaaagttcaactacgtttttagcatctcttggataacttgctacaccgaagcttaaagtaaaataaacattgtcgtcagaattttcatttaagttaaaagtattatccgataaatatcttcttatttcttcaagctccataaagcttctttccgcacctttttttacaagtaatatattaaattcgtcacctgatctaaataccatgtccgttgaagataaattgttatttaaaattgaaataagcttttttattacttcatccccaatagtgttaccgtataaattatttaaattcttaaaatcatcaatatctgctacaactatactaaaaggaccctcattatttgatattaattcttccattttaattattaattcctcttttgatgtaagcttgttatccataaataacctccatatataattaagtgattattagaaatcactctatttttttataaatatactatgacttaattatactaacaccaacatatatatgcgtcaatatatactaagcattaatatccattctgctatgttatatattcaaaattttaagaatattaaaatttatttattacaattcctaaatattaaattcatatggagactaagcagaaacctatattttacctaatatatgcttgtattatgatacatatccttaaatatatatattgacatatatatgttagaatgatatgcttatatacagataatgacaaaaaaataataattataacgctgaatctttttgaacgggagaaccattttttggggtgaatcttattttaggataagtagggttattttcttcaatccgaatccgtcagctaatctcgtaagcgttgaagagaagttttttgtatactgctaatatactttttttagtatacccataaatattattgcttaataagctatagatacttctctatagcttattatttttttactagtaatttaaagaaggaggctttttatgttaaaaatatgtttaattggacttggaaaaacaggaagagaaattgcaaaaatgatcttcagccaaaggaatatgaaaattgtatccgccatgtgcagccctggaagcttgaaaaagcatattgatctaggtgaagtaattggaattcaagaaattggtattaaaatagaaggaactaataaattagaagaaatattagtactttgtcgaccagacgttgttgttgatttttcaacgcctgaagctactttgaaaaactctagaattatttcacaaatgggaattaatatgataatcggtaccacaggattttcagaaggagaattagataagataaaaaatttagcctatagaaatcatacgggcatagtgtatgctccaaacataactcttggagtaaatgtactaatgatattaacaaaattggcttcaatcttattaaataattatgattttcaaatttctgagatacatcatagagaaaaaaaggacattccatctggtactgctttaaagatagctaatgaaataaaagatgggttagtttacttaggtaaggatatttctaaagaaaatattccaattaattcagttagagctggtggtgttgttggaaaacatgaagttatgattgttggagaaaatgacagaattacaatttctcatgaatccttttcgagaaaagtttttgccagcggagcaatccatgcaataaattttatacaagataagattggattctatgaaatgagtgatgttttaagcttatcaaagataataaaagatttatatgctcatgaaaataattttgacgctaataataatcttgagaatctaatagcagcggatattcaataatacattagaatttacaaataaatatgttaacgtttgagaggagtttttaatttgtaaaagaaattatgaaggtacattgtgcacctatactgaaccttctgataaaagccatgaatgcaagaattgtggaatatgtgataaatttaagaaaggcgaatataaaggtcttgaaaaactctatagggatgaaagaatttgtctgacgccaaaaagtaacgttagaatgaaaaggagagaacaattttatgagagcagatagatgcgacttaaacaatgattattatactaagatagatcgtataaaagcctttgttgatttaacaaataaacgtctaaaaatacttgatttaaatgctatttcgcttcaaagtcttaaaagaataattcattttgcatcaaaacttcacctaggaaaaattatatgcaattctaataaagagtctttggaagcttttgtaagtgctggctttgctatagaaggtagaattaatggatattttaaaggtgaagatgcattttgtatgtcttattatattaatagtgatagaaatatatgcagtaattttactcaaaaagacttactcgtaaagcaatgtctaagtttgcaaaacagctatgtatacaatgaaaataatcaggtgtatcaaataagaactgctactgaaaatgatattcctgaaatgatcaagctattttctacagtatttttaacttaccctacccctatatataatcaagagtatttaaaagagactatgaataataaaattttatataaagttgccgtttatgatgaaaaaatagttagcatagcttcagcagatatggatatggaaaatttaaatgctgaaataacagactgcgctacttcccctgcatatagaggtaaagggattcttgcaaatgtaatctattctttagaatgcgatcttaaatctaaaggttttcttactttatatagtttatgtagggctataaaccctagtataaactttgtattaagtaagcataattataaatttacaggaagaatggtaaacaactgcaatatatgtggcacttttgaagatatgaatatttgggtaaagaatattaattaataattggagcttaagcttaaattataatatatttaataagaactaattgactgctttttcagttttagagaaaaggcagtcttttttatatttataaactagtgcaaatttgttatgaattattcacctttaataaaattaaaaatcacattaactattaacatgttctcatacatatgataacatatatatgtttgtataattatatagcaaataattttcatgtaaataaattggaggaatagaaatggaaaaaaaacagagtacctatagcactttgtttcattggcatagttttaaattaaaacttgtatttgaaggaatatgcataggtatggtaactggtttagtaatcgtgctatatcgtttagcacttgaagaagcaggatatcttttaagttatatttataagcttatatcaattaaccccattattatattaccatggattatgctactgatagtcattggctacatagtgggattgatggtaaaaaacgaacctatgattagtggtagtggaatacctcaggttgaaggagttttacttagggaactagatatgacttggtggaaagtcattctcggtaagttctttggaggtgtcctttcaataggttctggcctttcattaggaagagaaggtccttctgttcaattaggtgcagcaataggacaaggatttagtaaagtctttaaaagaataaaaattgaggaaaaatatcttattactagtggtgctagtgcaggacttgcagctgcatttaacgctcctttagctggagcaatgtttgcattagaggaagttcataaaaacttttcaccattaattttactttctgcactctcctctgcattatcagcagattttattgcaagcagcttctttggactaaaaccagtatttaattttggagcttttgctacattgccactaaacttttacttttatgtaatcatattaggtgtaattgtaggatttctcggggtcctttttaataaagttcttttaaagacgcaaaacctatatataaaacaagcttggctaaaaaaagaatttagaattataattcctctattattatcagtagccctaggtcttttattaccagaagctttaggtggaggtcatgaactaataacttcattaactgaaggtaaattttctttaatattattagttattattctagttattaaattttcatttactatggctagtttcggctcaggtgctcccggaggaattttccttccgctacttacaattggagcactaattggaaatgtatatggcgaagttcttatgcacattgctcacttagatatcatttacataaataattttataatcttagctatggctggatatttcgcctcagtagtaaaatcgccaataacaggaacaatcctaattaccgaaatgacaggttcatttaaccatttgcttgctttggctattgtctcggtaatatcatatattgtagcagaccttcttgcttctaagcctatatatgaagctttactagaaaaatttctgcaaaatcaaggtgatagaacacccattggcgataagataaataaagctatactggaatttgctgtatgtataggatcgaagttagatggtaaacaaatcaaagatgtaaaatggccatctcgctgtctccttgtagcagttagacgtggcgaaaatgaaataattcctaagggagatactgttattttgcctggagactatttaactgtcttaactaatgaggatagagttcctaaaataaatgataccctattattaatgtctgaaacttctgacattctaaaataaatatattataatttaatttgtcttttaaataaaaataaacaggtatgatttctttatataaaatcatacctgtttatttctttagaaaatattctatattaaatctttatgtttcattcactaaactttcatacgcctttaaagtacaacttatttaattattaaaacaaaattttttataaattcatttgtaattaaatcagctgtgtataatcacatcaaccatattagccaatatattatagtatatcaatctttagggcaaaaatatgcaagaaaattacaatagtactatacactttttaacaggcaatgacgagttagatttgcaattgttaaatatagaaatatcaactgcttatcttgatatattatcaactatacttggtattatttcagcaaaaaagccaaacaactactattaaacagtataatgcagcagaagagtggcaagagtcaaaaaaaatgcacaaaatcagcaacaaaatagtctgactcaacaacaatctgatatttcacatccaaccccaagtgaaatagccgcttttgcaagttgccttggcatatatgtcgttctttcatatattaatttttcttttattagactttacgaagtatataacaatattcaagaaggtaatactaactttactattacccctaatataaatataactattggtttcacatattcttgtattggtactttattacgaataattggcgctatccaaagagttgatgaagaatctcaaataaccattctataatcaaaagtctaacttattagacatataatactctgtatttttaatttcataattaaatagttttaaaataaaataccgcaaattcctattgtgaacgtgcggtatttaagctatattaatttaattcatctataaatatattcactctattaatatttttgttaaatatagagataataataacgtaactcttacataaatgtattcatataaattgcatttttaagtttttattcaaaaatacaatttataaatatcatatactatacttaagtaaattaaggtgatctcatgaaaaaaattctaattaccggctgtggttccggtcttggacgtaaagcttcatttgctttagcaaatagaggtcattatgtctatgcaacaactcatactgaagaacaagccaatgaaattaactctttcaataaaaaatataaccttcctattgaaagctttaaattggatattttaaatagcaatgatagattgaagataactaatcttgaaattgatgttttaataaataatgcagccattggaaattcaggttcagtggctgaagtggattctgatatatatcgggaaacttttgaaacaaacgttttttgtccaattgaattgactcaacttgtattaaaacaaatgattcctcgaaaaaaaggaaggataatttttgtatcatctttggctggacgctcccccattccatttttatctccatactgcgcaactaaatttgcactggaatccatatgtccgtctttaaacgaagaacttaaagaacttaaaaatgttaatattcctgtaatattaatagagccaggaagctatgctactggatttaatcagaaaaatatatcaaaacaatttaattggatgaagattcattcttatttcaaaaataatatacattccctagaaaacaagcaatatacatactttaagctgacagaatccactaattttgattctattatagataaatacataaaagcagtagaagacagatatccaaaggaaagatatgtatccccttcaagccaaggtgctttcattaaaattaaaaacatcctaaaaaaataactaaaaaaaaccaatagaacttagtaattcattatatcggttctatttgttcttaaaaatcaaaaataactcttatgttatatatttatatatgtaaattccaaaatagtaaacagaaattattatgatagcaatgttgtaaggctaatctttctttgattcctttagttttttctatcaatgcctttccaattgttcctgtagagatagcgtggaaacaataatctataaaagtaaagatcgatataagccatacacgtcctaatgattccttctcggtttttatgtatttatttgctacctccgaaaaaccttttattcttccggaactacataaaaattaatttaacagtataaaatataattcaagtagaataataaatatatcctgttaagatcggaggtactgataattgaatgaaggattagtagtttttgtgcgtgctattattgcattcttttctttacttattttcgcaaagatacttggaaaacaacaaataagccaactgacattctttgattatgcccttggaataacaattggatcaattgctgcaactcttactacggacttatcaagcagggcatggcctcattttgtcggattgcttacttggtgtttacttggatatttaatggagtacattaccgagaaatggagatacgctgcaaaatatatcgaaggcgaacctacaattgtaattatgaatggcaagataatggaaagtgcattaaaaaaaatgaaatatacagcatcagatctcatgggactattaagagttaaagatatttttgatttgtctcaagtagattttgcaattattgagccaaatggccaattatctgttctaaagaaaccagagtatgaacctttaacacctaaggatatgagtattcaaaaagaaccaagcggtataagtactgaactcatatatgatggaattcttataaatgaaaatttgaaacaacttaataagactgaaaaatggcttatgaatcaactaaaaattcataaagttaaggatgtttcagaagtatttcttgcgaccttaactccttctggctccttatatatagacaaatatgatgatcatatggtaaaagtaactgatattggtgattataaaggaccatattaaaggaggaatttatcatgagaaaatttttagtaatatcgatacctatagttgcactaattttttttgtattaatcatgcttagtggcaatattttgaaggaacctatgggcaatgatgataacattcccgaatcaatacagctacttatacaggatatagaattaggaaattgggaaagtgccaatattaaaacagacaacctctctaattcatggaaaaaaatagccaaaagagttcaatttagttctgaaagagatgaaataaatcaatttgatatatgcatctcacatcttcgcggtgccataatggctagagataaatctagttcacttattgctttaaatgaggcttatgctcattggaatgaccttggaaaataaatattagagcttttctaaatgaataatctgcttgttaaaatacataaaactataaattattcatggttttatgtaactatagccgtcactttgcttatttacaagttccaaaattccggtaggaacaatatctacaaatgacattaaatcttccttttttatactataagattttaacgcattgttgcacgcaacaaacttaatccctttatgatctagctctttcatttcactgctaatccttaaatctaattcattatcgtaagcataagcctttacagcttctgaatttgctaaaatttcaatattaaaattgttaatatttatagcctccaataaattatttgtattttttaggactatactccatttacttagttcatctatatgaaatataactttatattctaaaatgatagtcatctccttttaaaaatatactataagcttcatatatctttatttctcaattaataatatgaagcctataaagattttatatggaattttttaagcacttttttattttccatattgtattttttcacaaagtctattttcttactaaactctatccttaaatataatatcaagaatagcagatattatatactatataaataaatttaatccagaatcttctgttgcccccagatatgaagcaactccacctatttcaactccatcaataaattcttctttttttattcccattaagtccatactcattgaacatgcaacaactttaacccccatgtctatagcattttttattaaagtttctaggttatcgacattatgctttttcattatttgctttatcattgcaggtcccattcccatcatgttcatttgtgataacggtaatttccccggatgagctggtaacataaagtcaaacattttttccatcatatccttagaaacactaggcttatctgcactctttaatatattaagcccccagaatgtaaagaacacagtaacttctttccccatagatgctgctcctgttgctattataaatgaagctattgctttatctaaatctccactaaatacaaccaatgttgctccattctttcccacaacatttggtgaagaagcatttttacttaaggatgctgatgctcccttttgaatatatgctatgaaggctttttctttattatcaaattcagattttaataaagtatttcctgttgaatcacaccatgattttatatcttttgcaaatccaggatcacttgctttaacttctaatatattgccatcttccatcttcttaatttcttcaaatactctttttattggacctggacattggagaccgcatgcatttaacgtagtatttgcatttatttctgttatatctagatcttctaatttcattacagccacctcatcttttatttcttcattattttcatattgatttttaatgctttcttctgctctttttacatatagatatgtctttacaccaccatctatatttgcgcaccgtattccattttgttctagaattctgcaagcaacatatcctctaagtccaacctgacaagttacgtatatgtttttatcttttggaatttcattcaatctacttcttaattgcccaagaggaatatgaatagaattatcaaaacctcccgtaactaattcgaactcttctctaacatcaattattaatgatttttctttgtctaatttatctatttcgttccattgaattgttttctcaaatccttcaataatatttgatgcatagtatccaagcatattaacaggatcttttgctgaattatatggaggtgcataacaaggttcaaaatcttgtaaatcaaagactgtaaaatttcctttaatagcagctgaaagtacatctattcttttttcaactccatcaagtcctacaccttgagccccaaatatttttcctgactttggatcaaatagcaatttaaaagctattgggaatgatccagggtaatatccagcatgagaacctggatgaatatgaatagtctcgtatgctatccctaatctctttagtatcttttcgttattgcctgttgttgctaccgtatagtcaaacacttttgcaactgatgatccaagagttcctttgtattcagtattttttccacatatattatctgctactattcttccttgtctattagctggccaagcaagtggaatcattgttggctttttatttacaaaatccataacttctacggcatctcctaatgcataaatgcttgggtcagaagttttcataaatttgtcaactactatggcgcctctttcatttaagttaagattagcttctcttgctattgttgtttctggcttaacaccaattgataatataatcatatcagttgtgatttcttttccgctacttagtattatctttttacctttactctcgaatgcagacactccatcttttaatattaattctacatttttatcaattaagtgttcatgtattatacttgccatttctatatctagaggagccattacctgctcacctgcttctacaagtgtaatatcaattcctctagcatgaagattttcggccatttcaagtcctataaatccacctccgattacagttacatgtttaggcttgttgttatctacataagatttaattttatctgtatctggtatattccttaaagtaaataaattatcacattcatttatcccaagtatcaccggtttaagtggagctgcgcctggagataaaactaaaatatcataagtttcttcatattcctcatttgttctataattatttattttaacctttttattttctttatctatacttataacttcatttaaatttcttatatctaaattaaacttgctgctcatttcttctactgtttgaactattaattttcctctttcatcaatagtttctcctatataatatggaagtccacaattagcaaaagatatgtattcacctttttccaccataattatatcaacattttcatctagccttctaagtctagctgctgtagatgcaccacctgcaacgccaccaacaataataatctttttattcataagaatctctccttttaattaactaactagtattggaaatcataaaattgctattcttttatatcttcaagatatattcattaatctcgttttctgcattgcaatatatcttaatttaagtttaatttatatagttattattgtctgtgactttatcacacatatgactttttagattattcttttgaaaattgtgttatatttttatcctggttaatgctgcaacctatatattgtgcaatattataataaaatttctgtatattaaaacaggtagtctatttttacttagactacctgttatgtacataaattcatatattatcatacatattaaacttaaactattaatttatgaagcgtgtataatcttttaaatttctaatttataaaattttataatagttcttcaaatgttataggcatatgatttgatatcgtttagtaataaaactatcttaatctattttgaactcttagtatttgtataaattgtttaaataagttaatcgtgataaatatatacttctaaaaagatttttataagcaaaagcgaattaattaaagtccctaaataatcaactattgcttattatagagaaaagaaaatagaacaaaaaatctaaaaataacacatttgctatttctttagatatcttccatcacttatcaagctaattgttgagaatcatcaatctcaaaagagatgtttaaagaataatttattcatattgcatatatttatgacaactatttgtcacaaacttatagtagtatattttttggaaattattttattaataaagaggcggaaaaatttatgcaaaagaaaaagaaagtatccatttttttaatattatcaatatctttatcagtttttatattctttcatccacttttttactacaagtttttagataaggatttaactgttataaacaatactgtatatgctagttcacttccagataatacttttaaaagcacatatactccaaaaatcaaattcgaagatagacctgtaacaaaggttaacagcataagtttaaatattttagatgaatctaatattactaatgttcctatgctgcttaaatcacagagatactatataccactcaattttatttgtaataaactcaactatactattgatatttcaaataataaaatttctttatctaacaaagatgataaaatttctttaactgaaaattcttatactaaaaattctaggacaggctctcttcgtggggatctgataaataatgatggcgttaactatatttctatttctgatatagaggaactttttaatttaattgctatttttgactttaaaaacaataatataagcttacttaataacagcgtctcaatacctgaaaattcttcaatatcttatagtgataaagttgctttaataagattagaagatttcggatgtggaggtaattattctagtgataaaaatcaaacaaaaataaaattaatggcgaatcttttttattcacaaggaatgaaatatcacgttagctggattcctagatttaaatctcctactgagaatattgataatgatttattgacaactgacaatataacaaatgttggatttgtcaatctattagattatctcattaataaaggtggtgaaataggactgcatggttatactcatcaacatgatgatgaaaaaagtggacctggtaatgaaatgactaaagatgtgaataatacagttgatcaagtacgtgctatagtcgaaaatggaattgatactgcaagtgctttaaatattcctatttcttactacgaaagtcctcattatggggaaactgaacttcaaagaaacgttattgaagattattttcaatttatatatgaacctttcgacagtacacgaaacaatatatataatttagatgactaccatttatttgttccaacacctttaggatatgtacacaattcagaccctacatccataactgatgggcttaataatgatgatcctgatatacttcatagtttttattatcatccatttgttgaattaaattatgtacattttaatattgatgataataaacttaatgtaacctatgatgaaaattctccgttgcaaaaaatagttaaaactcttaaatccgataattatgttacagttcatattgatgaacttatagataaataaattcaaaaactttcaaatttatttatttctcttttttacttaataaagattattgacatatgccactaataatataattataatatataaacggcatatgttaataatcttttattatatgataagcttaaacttctataactttaagtaatgtattaacctatatgttctttcctttccagtaacttttatagcagataaattctctctaaattaaatttgtagcttcatcctttattattatatattctaaatgtaatgccctagttaaagaaacatataataacctttcatctaaaatgttttctttatagttgtcttcacttggattcaatattattgtacaatcaaactccaatccttttgttaaatatgatgggattattattagatcttctgctatttctttttctttgcctaatattagttcaaaattatatttgctctttccttttagaaatttgtatatttcttcaccttgtaacatattttttgtaattattgctactgttctttttccgtggttctgcacttcattaatgattttctctatagctgaaatatactcatctccactagaaatctttactattttaggcttttcaccatgtcttaaaactggtttagcatccttaagtcctaagttttgagattgtaatgttttctttgcaaaatcaattatttcaactgttgatctatagctttgcgtcaattgaatataggttgcatttccttcaaagacttgtttcgttatatcttcccatgtctttagacctttataataataaataccttgagctaaatctcctactaaagttaacgcattacctttagcaaaactattaactaaatatacttgaaatgggctataatcctgagcttcatcaactataatatacttaaatttttcttcctcatcaattccttcaagcaaaattcttatatatgcaagagctggcaagtcatcttcatcgattatattcttctcaaaattactattaaattcctccttcatataatctgccaataccttaggaatcttacttccagttgctgtttcaaataattcatcattataaaaattataatagatatctctagaatttatatccttccaatctttaaagtaattattaaattcctttttaccgttagtttttacattttcctttattttgtctctctcttcatatagacttataagcaattttcttctttccagtgaatcttcattttctcttcttatttctcttattttcttttcccattcattatctatttctattaataggctttctattctttcttttatttttaaatttaaatatctttttatctcctttttccttttgttgatgggataagcttttagatcttttatatataatctcattatttcttttttatgaaatagtatctcatttccaactttaatatcttcaatatgaatcgcatctttttccattaatgctatatatctatcaagcattgttttaaatagcatggttcctttaactttgcttgaatttacaataagcttttttagattctcatcattttcttctattatctttaataatttttcatccttattataaacttttccttttagttttaactttgataataccatttcctcaaaggtactttgatttacttcttccgctccaaggctaggtaaaatatctgaaatgtaacttagaaatagtttattaggagctaaaactaaaatttcatctccactcatgctttctttatatctataaatgagataagctaacctatgtaacgctattgttgtcttacctgaacccgctgacccctgtactattataggcagatttttaggccatcttattatttcattttgttctttctgaattgttgcaacaacttcttttagctttttcccactgctttcttcaagatttatctttaaaaactcatcaactaaattttgtccttcttcttcatttataatgatgttatttattccttcatcaaatactttttctatatcactattcttatataaaaattttctttttaattctagctttccttcaactattccttgtggtgctttgtagtacgcatctccaccagttccgctataataaagatccgcaactggcgctctccaatcaacaacaatttcttctccatctttgctgttacttataccttttttcccaatgtatatactttcagtaaaccccatattttctctaaagtctactctaccaaaataaggctctattaacgactcttcatatttctcaatatcttgatataaataactaaatattctttcattagcttgcttttcttcactaaagctctttacttgtttatttaaagtcttaattttttcccctacttcttcaaatttttgtttcttttcttttaattcttgttttattatatctttcttctgcagtaatacgtctctttcttcgttcaaaattgtatccatatttatacactatataatgacaggtagcaaaattcattatacttttccttccattaagataaattactataattaggtattataccataatatcttgaattaataatttaatttttctaataattttacacttctagatcaatatagattattttactaaatacagtcagaaatacccgcttagtagtggttttttgaataccaaaacataaaattaaaaactcaagtaatttgttattagaatcacttaagtttttaacgttttgcagatacataatattattttttcatttactttgagtcattttactcttatctaaaagtttagatataccagatgtttcccaatcttctatctcattagtggcttcattaaaagtcattccctgccccacaagtatacctatcacgattaactctataactttcctttatttaaaaaacattttatttgccttctcctaaaaagtcttataaagaaatatgcaataatagcaaagcctattaattcaggtaaataataagttggatctgtaataagtctaacaatatcactatttacccaattgccttcaggtcttgcaggaaacttccatccaaagtatggccaaaacaatatattagggtataaccacatactatctaatactaaatgaatagaactagcgattcccaagaataaaatattcttttttccatttctatttaacatatatatacctattaaaatcagaactagagaaaatatcaaagtatgtccaaatattcggctattatgaaatacactgcgaaatacaccggcaccaattggcttatcaataatatcaggtaatattgatccaatcaaaacatatctataatcaacaaaaacttccttgccacttaacttattatctttatgtaaaatcacctcatatgcctttatcgcttcagttgttaaccccaaatgtccaaaaaaaatcattcattttcctccattattataaaaactattttttatcgtttctagttttttaattgcaatataatctatttttttgttacaactaatttaaccaaataacttttcattaaattttatcactaagactcttatgtagtcaattttgccctataaaacatagctataaattattaaaagtacaaaaaaactcagcctaaaaaaagctaaactttcttatacttttaataatgttttttaattattgaacattatacatgcctttactctccatatacttaaatatagattctccatgcttttgttcttctttttgtatatgatttaatacatctcgtacttcagtatccttgaattcaaaaattgcagtatcataagcccctgacacatatttttctgtcattaataaatctgagcatatttccttatctgacaaattacttgtagtactttgagatttatttatatcttgatcaacaccttgtttttgttgcccaccttgttgttgattcatctgaggaacattgccacttaataactgattaattgtattaagatggctcctttcaatttgctcattattcttgcaaatttgtttcaattgtggatcttgtacctgattagcataatttgaatatttttgtatacaaatttcttcatgacttttttggtcttctagtaacattttttctttttgcgttaaatttacttgcataataaaacacctccatttttattctttgaaagtgttctattttttattcatttataattaaaatttatcttcctcttcttttaaatcgctaaagctatattataacttctttgaccagttataattgatggtttaacggaaaatgaatagtaaatttagtaccttgattaattttactctctaaatatatattccctccatgggcttcaactaacgcttttgtgattgtaagtcctatacctgatcctccagtatttttatttcttgataaatcacttctataaaacctctcgaaaatataaggtatatctttttcaggtattccaattccattatcaataactttaataactacattctcattttccttttttaattcaacttttacttttccgttaggtttcagatatttgtaagaatttgaaagcaagttagttataatctgtttaaatttatccacatcaatcattgcaactatattaggagttatactggtatctaactcataatttcccttgctataaagtggtttaaaggtatatataattttttctaattctttggaaatatcaattctacttttatttaatcctatactagtctgctcaagttttgatagatgacgaaggtcatcaaccattttagtcattctatcaatttcttcataaaagacttcaaatctctcactagtcggttcccaaattccatctgcaaatgcttctatatgtgtttttaatgtagttaaaggggttcttaattcatgcgccatatccgaagttaatctttttcttagcatttcttgattatttaaagattttgcaagataattcatagaattagacagctcaactatttctttagtacttgaatttacttctgcctctacatttaaattaccatttctcatttcgtttgcagtttccgttattttagctaaaggttttgatatttgtcttgaaatgattatgctaataataactccaaatattaaagctgcaatagctgatatcaaaaatgagtgatttaatgtacttataaacgttactgatgcagaagataaataagaagttccaaagtaacccacaattatcttgccttcttccttttcatcaatatttagaggataattttcttcagtgtattcccccatgtttatcccagaataattacgcatcattccagccataggtcccatcatgtttccatttcccatcattcctctatgctgcaaataagatttccctgaagtatatattgtattatcatttaaatccctaatttctatatataattcctgtaattcagcatacctttgaatttcatcattatttatttgtgaaaagtttttttgtccaccatataggtcatctatgatttttactgcattatctattttttctttgtgttcatcaactaagtagtctttaaatttattccctactgtataatttgatatagcacttgctaaaattatcgaacctaatactgctaaaataaagcctaaagacaatttcttcactaaagataccttcatttttttacctcaccattactcggaataaatttatatcccattccatatacagttgttatatacgtaggttccttatgattactttctattttttgacgaatatttttaatataagaatcaactgtcctgtcaaacccttcgtagtttgctccaaaagctttttccactaatttttctcttgaaaatacttgtgttggatttgaaagaaaaactgttaagattttaaattcatttgttgttaaatttacaaccacgccttgtttcttaactaccatctttttaatatctacttccaaatctccgttattaaaagtcaaaatatctgccattggcgaaaaatctctgtaagctcttcttaacaatgccctaacccttactacaagctcacgaacactaaatggttttgttaagtaatcatcagctcccatagatatgccttctattttctcgtcctcttctgcttttgcagtaagcattataatgggaacactcgatactgctctgattctattgcatacttcttcaccagtcattttaggaagcattaaatctaaaacaatcaaatgaatattttcgttactatatatatctaacgcacttttaccatccatggctgtaataacatcaaagccgtctttttcgaggtatgcctttattacatctaatatattttgttcatcatctacaactaatattttgaatttattattcacatttacacctccaacgctctttttgtgattatattatagtgtaagcatataaaaaagactagagcaagacaataaattataaacatctctccactctaatcttaataataaacctaattcttttgtgaaagtactgattttctcttcaaatattcttcttgagttatttctcctccagcaaatttttcattaagtattttcattgcatcattagatttattggtgtagtttttaaataatttaaaagcaagcacaattagtgcaataaatattaacattctaaatcccatagctaaaaacattcccccatatcctatagagcttgctgccccaaaaccgccatatcctccaaaaccactacaaaacatatatagattcctccttacacttataaattaattattttctatgtaactaattatataggtcaattatggaggaattatggagatttagttaaaaatctgtttcccaattaaatcaaagacaagtttcaaaatttaaattagattagttttatataaaaaatagaagcctttacagcttctatttttctatgttaatttcctatatcttaaatatggatactgcttctaataatttgtctgcacattcttttgtcttatgtgtttgttctacaacttcttctgttaagttaactacctcatttgacttatttgcaattaaagttgttcctgtagcgccttcattagttgcctctgcaacttcatttatagctgttataatatcttctgtggaattaatcagctcatctgatatttcacctatagtgctaactaattcattgaatacaatagcatcatttctatattgttcccctgtgtctacaagtttgtcataatctttcataacttgagttccaataaaattaataacttcatttgatgttcctttaagatcattgacagccataacaacctctttatttatctgctgtatttcaattgtcgtttcttttgaagtttcagcaagtttccttatttcatctgcaacaacagcaaatcctttaccagcttctcctgctcttgctgattctattgctgcatttagtgctaatagatttgtttgctcggttatttctaatattctagctgttaattcatttattttatctactgctttagatttctccactgcaacttttaagctttcttgcattttcgaagttatgctgctagattgctcccttgattgcaatgcatcagatttaagttttttagctcgttcctcaatttcctttgcagttgcctctccgctttcaacacttgattccatagtctttattatggatttcatatttgctgatgaagcatttacttcctctgtagatgccgccgtttcctccatacttgcagataactcctctgttgttgcggatacatctgaaatttggttatttaagtctactatattctcttgtgtaaagtttattgaatttaaaaccacattacattcacctttaacaccagatattatatttcttaatgatctttgcatctcatttatagacttaaacatttttcctatttcgtcttctctgtccacatattttttgtcaacctctactgtaagatctcctttagccagtaactccatttgctcttctgcgtatcttattccttttgtcattcttttaattacaatatgtattacagcaataacaattaataatgataaaactgctgaaattaaaataacattaaatattttattatagctttctaatgttttctcttttggaatctggctgcatagtatccaattagtctttgtattttctaagttaaccggatctgctaccattaaaacttcctgtcctttttttaccgaagttccgtaagtataaaattctttaccttgtgaagtttcacttataacttttgcccaagttgcattattttgttttgcatctttcatctttaggcttggatcttcaccacttgccacataaataccttgattagatattagttcaactgttcctcctagtggtgttttttccaatacaagtttttctaatgtatcgagcttataatctatagatattactcctaagaactttccactatcatccaatataggcatagctaaagataccattgaaatatcttgtccattaacagtataaactgttggttctgtaatataagttccttttaattcctttggcttattgtaccatgtcatatctgtctgatcatcataggctggtaatactactgtttgatctccatttctacttgcataaggtatgaactttccatcctctgcaaactcttttctgcctttataataatcatctcttccatcaaatgcattcgcctcaaatgcaactgtaactccaaaaatttcaggatcagtctttaatatttctttttgaatttcaataacaagatctctattctgagaattaagcttaatttcattggttagtgccccccttaaatccttacctattgtttctagcttttcaaagttagatgtgatttgtgctgcataagataaagatatttcttttgctaaagtttcactatccattatgcttttagactttatttgtactaatatacttgcaaacactcctatataacacacaagaattattgatcctattattatgcttatttttgtccctaaattaaactttttaatcatgcaacgtgtccccccttatgttctaatctattgcaacaatataagtaattatagcactaatttgtcatatattgtagtttcttaacataattctaacagttttatactaatcagtatatttatactgactaaaaaagtctaaccctatgatcataaattactaggttagactcgcattagtttaattctaattttataaaaaaatttattcagaaggtttacttacatgcactgttccacgtggatgcttaggtggcgcataaatagagtataccttaagaggtttcgtacctgtattaataacattgtgccaagtaccagcagggataatgattgcaaagtcattacgggcatttgcttgaaactctagattatctttgctttttcccattttaacaattccttgaccatcttcaatacgtatgaattgatcagtatctgggtggatttctaggcctatatcatcgcctacatcgatactcattaatgtaacttggaaatgctctcctgtccataaagcagtacgaaagttggtattttgctttgtagctttatcaatgttaattaccaaaggttgtggtccatagtctttcaaatccattttgctatttccagttgatgattgtggaatatcagccctataatcgtactccatttcatcaaatagcatagaatatggaacagacctgaaattagaattctgatatgtccaattattattgtatccgttctctaagttataatctgatgtttcagatgaataatctactgaatacattccatcattattcatatttttcttccttgtttattatttcaaaaatataatatgttataattccatgaatgttctattttttagtaaatattcgtattaaaagatattttttaatttttaacatctactttaaagcataaagatttagagacgtcttgtgaagattataattatttatttaatacatcatatactcatattatttaagtaaatatcatagttattaattataaactacatataagtgggtgtaagtcatgacaggttttgaaaacttaactcctgaagattctttaattttaacaaatgcaattgctatttcacttgcaaaaggtaaaaacgctgatgaaataaatgttattggaaatttccttgtgggtataggttgtttactactgacaatagcctcacaacaacagtatttaactgtattacaggaatctaggaattctaattctacacaaaataacaacaataacagcaacaacaccaataataataataataataatgctgctaaatcaactgcagctgatgatgtaataattggttagctttagtagattaaatatacttaatctactagggttatcccaagattttcatagaattccttattaatatcatgacattctttaatactattatctttcctaaattttattacatattgcttcattccttctccatatatgccatctaaatttccaggataataagctttttccttcatttttctttgtatctcaaaaacatctgagccactatctccaggctttaaatttactaatcattttttcaaaagggccatattgacctgcgcagtaatatattttttatatattttaaatctagcataattcttataccctattccatagctaatgattaatttaatcattataatctcaattccaacactagctcttatcacaatagctatcattatcaattgataacacacttcaacattaacctattgacttttcaagcatataaatatattatagtgttaatttgttttatcaaatgataaaacttatgttaaattatggaggcgttttatatgaatgcaaaagttaaagttgcaagattatctctattatcaaatagcatcctaataactctaaaattaattgttggacttgctactggttcagtaagcataatatctgaagctatacattcgactatggatttgttagccgctataatagcgtttttttcagttaaaatatctgataaaccagctgatgatatacatccctatggacatggaaaaatagaaaatgtttctggcgtaattgaagcaattcttatactatcagcttctatttggataataattgaagcagtaaaaaaattaacaattcctggatctgtggaatcaattggccttggatttatagttatgtttatttcctctgctataaattttatggtttccagaaaaatatataaggttgctaaacaagaagactctatagctcttgaagcggatgctcttcatctaaaagctgatgtttatacatcattaggtgtaggaattggtttgtttcttatatggataactaagttgaattttttagacccagttgtggctattttagttgccatatttatattaaaagaagccattgaactattgatctctgcattcaatccacttttagatactaagctatctaatgatgaaatcaaaattattcaaaatagcataaataagttttcgagtatctattgtaactaccataactttaaaacaagaaaatctggacgaattaggtatatcgaattacatttagtatttcctgaaaatatgcgaattaaagatgctcacgacgtatgtgatagaattgaaaatgatataaaaaaatctctaaattactccgaaattatgattcacttagaatcttcagagtataatcctaattgcgctaaatgtaagaataagtgtgattaaagctaagctatacagaatatataatcataataatctagatacagttatactaaataaagcgatggattaaacatattccaccgctttatttgcaaatctgccttcatacacttttaaaagttattcaaacaaagcgaaacttttaaaagtagatttttgcaatccgcctgaatttaaacctatattctattatttataaatgtgcattaattttatttagtatattttgttttggcataaagcctgctaaattctccactggtttcccatctttaaatacaatcatagtcggtactgcatatattccgtacttttctgctattctttcacttgcatctatatcaactttaaagaatttagctttccccctagcttccatactagcttcttcaaatactggagctaacattttacatggtccacaccaagttgcgaaaaaatcaacaactgctattccttttgagttctcaacattttcaataaattcattactgcttattattctagccataattaactcctccaatttataatttaaatttttcttttcctatacttaaagtatagtcttattttcaaattaattctgtgacttaatcaccatatattttacttctttgattaatcaatactttaattttaatttaatgtttatctcatttactcaataatagctgcacttgactttttaattcatcttcagttatttctcctgaatgatcttcaattatatttccatctttatcaataaataaagttctaggtatatatataatattataatttattgaagcagttccatcattatcaaataaaattttcatatcataatcattatctaatatatattttttagctttatccattgtttctctttgaccatctgttaaatccaccattaaaactgttaattcttctgctttatatttacttgaaagtttattaaatagaggcatttcttctttacacggaggacaccagctagcccaaaaatttactataacaggtcttcctttataatctgataacttcactttattaagcttttcatcatatacaacaaagtccttttccgcttttttatcttgtacagtaggattgtcagtctcttcttctttatcctgagaagtatctttacttatgtttatatctttcttatcatatttgggacctaatgagttatatgccaaataagatatagctaaaaatcctgcaaaacctattgctgttactgttaatattaattttttatttttcataaaaacctcctagattgtaaggaatgaaattaatttgtttagatatccagtcataattgcaattcctacaattataaggattaacccagataacatatttataattttgtaatttcgttttattaagttaaaagtatcttttaagctatctattaaaatagcgcatattataaaaggtattccaagtcctatactgtatattaaaagcattagtgtcccttttaatatatcgtgagagttaactgcactcattaaagctgcacttaagaatgtacctacgcaaggtgtccatcctattgcaaaaatcattccaaataaaattgatgataaaaacttaaaagtttttatttgcacatttatctttgaacttctttctaaaaatgatattttaaataacccaatataattgattccaaaaacaattaatattaatccgcttattatattaatgatgttactttcagtttttatgaaacttccaaaagaccctgcaagacttccaagcagcgtaaatatcactgtaaatcccaatacaaaccctaaagaatttactaatgcattatacttactcttattatttgttatattgtctcctgcaaaatacgatatgtaaagaggtatcataggcaaaatgcatggtgatataaatgttataattccttctaaaaataatagaaaatattccatagcttgtcctttcctgataaacatgagattttatgatatattacctttatcatacattataaattatttataaaaatttttatgtgatttagtcacattttaataaagacctaatatatagataaatagcttttactaacttagacttatgttgtaatcaactgaaattacatatttttttattaattttatattattgacatatgccattaataagtttattataatatataaatagcatatgccaacaattttatttgctacatatgctagatttatatacttattggaggtttatattatgaaaattgcattaccctcacgtaataacaatatcgatgatcatttcggacactgtgaatattacacgatcttcacagttgatacacaagccaaaaaaataatagattctgaaacccttgaatctccagctggatgtggctgcaaatctaatatagcatctacgctttctgatatgggtattaaagttttacttgctggcaatatgggtgaaggagcggtaagagttttaagcaacgcaggaatagaagtattacgtggatgttctggagatgtaaaagcagttgctgaaaaatggcttgaaggttctcttatagattctggagattcgtgtcacaatcacgaatgtcataactaatatatctaataataatagactcaatattatattggtctattattatttactttcataagcttaagcttctataactttaaataacttactactctatattatttcctttacaccaatttttacaaaatcctgcttttttattgcacataactttatcagatccacaacttgggcataccgctctatcttgatcataatttatttcataaattgtttcacattctgcacatttaaatttacaaagctttgtagtataatgaccaccacttatccttattgccttaccttccgttagagctgtaactactttttttcttgcgctatctattatattctgaaatgtctgcctcgatacctgcattttttcagcacattcttcttgatttaactcctcaatatcctttaatctcatggcttcaagttcttccacttttaaagctatttcttcgatttgacattttggctttccacatggtacaaaataatcatcttctgggaaaaattccactcttctaaatttagttggtcttgccacttttttatcctccttggattactatatatttaaagcacgtaatacctaaatctattataaatattgatatatatgataaggttaagttcctatatttttttcttaatcaagtaccttactttacttactaaaagtttaaatataagtttattaatgaaaccatatatttaattatactagattaaataaaatgcttcaaatttgtgttaatacttgtatttaattcatcaaaataaataaaggcggctaatagctagctacctttatattgtttaatattactatagtttaacattctattttataataaatatattagatataactttaactttatttattgccataatgtatagatgcaattccaaaagttaaagattcatattctgaatttttaaaacctatcttctcaagcgcatccttaagctgctttttattcataaaattatttaccgaatctctaagataataatacgcttttttatcacctgtacctattgaacctactgctggtaacacatgattaaaatataagtcgtatatattttttaaaataggtatattaggtttagaaagctctaaacataccacttcccctcctggttttaaaactctatacatttctgataatgctttatttttatctggaatatttcttaacccaaaagcaattgtgatacagtcaaaggtattttcttcaaagggcaattctaaaatactgcctttaattaattcatacgtataatcctttaatgattgatttagccttttcgccccaacgttaagcatttcttggctaaaatctacaccaataactgttgtattttttccaaccgccttacattcataattaatcatttgtcctgtaccacagcacagatctaatacttgatgcccctccttaatattacatatctttattgcttttcttctccataatctatcgatgtttaaagttaatattgaatttaacatatcatatctctttgcaataacagaaaaaatcttttccacatctgttacattaatttcagccattataaccaccacacattcttttattttacgcttataaaacctaataagtatttaaattagttatatttctttaaattaagctttttaactactatttttgatttccatatatcttattacattagtggaaacaaaacaaatactgtgaaatcccaaattgcatgagatattattattggaacaaggcttttttctttcttataaatccatccccaatatattccacatactaaggcagctaccacaagcataaagttcaatgtaattatatgaacaccagcgtacaatagcgttgcaaatatatatcctttatcttctccaaatttttttgcaagattgttttgtataaatccacgccaatatatttcttctcccggccctattataaataatagtagagctccaataagtaatgaatttccttgtgctctattgctataaactgatgcgatttgagcatctttaaatggaaacaaatatcctgaaattatatttccagcaaaaaaaacaaagtacaatattattgctgaaataattccgattaatatgtgtcttaactttatatttctaaatgaaattaagttcttttcagaaagcaaagctaccattactaacgataatatggatactcccatttcaatccaaaaattaaatggttttaatacaaatattacaaaccacagtattgtagctataattaatgaagaaataatgatcttattcttacgtttctgtctctccaaaactttgccacctttctataaaatataagataaaagtatagataaaattaaaagaattccaaattgaccttgaagctttccactttctttatcaagctcggcaatattgctacttgaatctccagaagttcttaatttattaatgtttttaatagcagctggtactgttaataaacagattaaacttagataaggaatatatttaaaaacaatcattatgataagagaaatatatgaaagtataatcaagcttgaatatactttttgtgccttcttatagcctatacttattgacagtgttttaatgccagctttcttatcatgatttatatccctaatatcattagcatgcaatattgcagtagtaagaagtgctgttgggattgatattaaaaacgactgcacggtaaactcctgcatctgcaaataataccctccaagtgtcatcaatggcccaaaaattgtaaatactaaaggtgcacctaatcctctatatttgatcattaacggttttcctgtataaaaatatccacataaagctccaacaatccctaaaatgagaatcataatgcctacattgtaagctaaaaacaaaccaattaaacatcctaaaataagtaatagaataccgcttctataaacttcttttaaagtcagcaagccttcaacaacaactccgctagaactatgagattcctttgtatcaactttatttataaaatcatcatgatcattcagtaaattaactgaagcctgaagaaaaacaattgctatgattgaaagtgtaaaatattcaagattaaaattaggctcttttaatgctaatatttccccaagcacaactggaattgctgaagctgttaaagaaaaaggtcttgaagctctgataaataacttaattttttcaattgtcattttcttttaatctcctctatcaactaatctttcttcatttgtattaatttattcttcttacaaggtgcaagaaaaataatattatagcttatctaaaataatttttagataagctataaagaattattacatacgcattgccataggtagtgagaataacattatattaactactgctagtaatattaaaagaatagaatatactattgttgtgctaacttttttagattcataattattcttcgatattttatatacagtatatattgaaccaagagttccaattgctattaatataaactgaaacgcttgtatcgttgggtcatctaaaatagctgaagatgtatgttgaatttcaactccaaataattctataaatgtatagaatacagattttccttctgctagtaaatggaataaattatgagctatatgtgcagccatatctaatggtatgagcgcatatccatacttcgtgaaattttcttttaatgaagctttattaaatgtttttgcaactaatcctgttatagataacaatgctactggtatagccatagctataataaatgttatagtaaaagtaatagcataattttgtgttcctgttacattttcaagccatgcaagcattccatcccatatttctaacattgtaatgttttgtacaaatactatacccataattacaacagctaaaaatgatgcatctaatcgtggctttctaataaaccataattctttagtaggtggacgcaatgatatttgaattgaattgttaggacaattctttacacaattaccacagaaattacattctgcattatcttccatagtttttgggaattcaaacataggacatccttctgccctttcactccctttataacaatgtgctgctgtacatttagcacatatatcttttgttccacgtaattgcagcatccctgctcttgaataatttccagataatccgcctaagaaacatagatatctacaccaggttctacgttcccaaaaagcacctgagaatattacaccaattgtaataagtaggagtaatgttcctgaacctctaggtgattcaacgactccaaaaacgtgatcactccatgtaattgctaagaacattgcatctataagccatactccgtattttcttagaaatttaggtactggctttttgcttcctacaaatttttgtactacatcacttaaggctccaaatggacatatagcacaccaaaacctacctgttaaaaataatagtattggaagtataggccaccacaatacccaagttcccgctgtaccaaagttatcgtgagcttcgtcaggtccagttagtaattcaaacacgatgaatgcaaatactattcctacaaataactgaaatattcctggataccacttacttttaatgaagttcttaagtattttattatttaataaattatttcctctttgctcttgtgatgcctttgtttcatcactaagtttcttgtccaactttgacattaaactatcacctctattctttatctttatttgctactttttttctttactgcagctactataattattactgccactattcctacaaatccacctataactacccagtttggtccactgctaaccacatccgcatcaaactgtacatccttctgttctccatttaccataatgttagctgtaataacccatttacctttatctgtgaaattaatttttcccatgtattgaccatctttactattttctaatgatacttcaattggctttttgccattcatatccatgcccatatcagagtttttgtccatttctgcacttatcttaacatcagcattttcaatttctttatctttatcatcatgcaatgtgatcattacatcattatcacctgttttaactttgttatctttattaaacgttaattctgcatttataccatttacacttttttctgttcctttccccatatccatgttacccattccatcagcaaaagctgctgttgaaagacctaacgtaagaattaaacttaatattgcacctctaattgttttctttttcattgttttttgactcccttcattatcacgtctaaagacttaatttcttttttgttatatttttattttctatgctatatttattgtttaccatatttctttttccaaaaggatacaattaactgatcaatcccaattttataagcgtttgctccagctgccattaaaattatagctacagtatataaaattggattagtgctagtagttcctgctaataagtaatttaaattcataaatgctccaccagtcaaacctgctatagtaaaagctccaagtattaaacttataccaactagaagttctccggctggaactacatatgtgaacactcctgcatttggcagagcagcactttcaacaaatcttgcataccaccactgtaccgatggatgatcacctgttgacttagctaaggctccttttaaaaatcctgttatcgctacacctgattgacttcctacccaagttggatccttaagtttctctattgctggaactatccattgatagcctagccatatacgcaaaattgtccacacaggaactaaatatttatttctaaaaaatctcatttaatgtcatctcccttgtgatatttattatgaatttaagattaagcattttttgttttcttatttgaagattcaagtatatgatttaaaagactattcatgctatccttataaaccgaagtctctaaatttttaattgcttgttcagcttttaaagcaaactctttagcatcttcaaccgttatattatttttagtagcgttagaatcaccatctgtgcaatcatcaatgatttgatataacattcctaaatttaagccgtaattttccaaggcttcaatttcttcttcttttgcattaactgtttttgctccaagcttacagcaggcagccataaaggatgcagttttgccttctattatgttaaagtaatcctgctttgtaatttcatgattttgagcttgttcaatttctgcaacgcacattttttcaataacttgtgtaattatttgttctgcatcatttgttggtagttttaataatattgaaaatgctttagcataaaaggcatcccctgcgagaaccgctatctttctaccatatatattatttaacgtcttttgaccacggcgaaataaatcattgtcaattatatcgtcatgtaccaaactagcactatgtattagctcaattgctacacataaattaattaatttcattctctcatctatagtcatttcaggatttatagctttagctgaaagtattatcaaactaggacgaagatattttcctggaaccttaaaaaaatattcaaatatctcttgagttgagcccgaactgaaatcttttccaatattttttaaaatcatctcaacttcacaaagctctttactcacagcatttttagcttttataaaacttgacatgacctcaccacctctcaataatctaatcttttaatataattatttattttaatttttatataattgaattactgttctttagagagtatacaaagaacatgtgtagaaattatgaagataatttttaaaaaccaaaatgttaattgattccttactttttagatttaatccaaacttaatcattgccatatgtagtagatagtactaaaaatataataagagctccaataaaaaccaaagttttattagagctctttaaatttataatattttactcttttttaattcagttactcacacaattcgttaattaccccagctacccttgtacaaaataaaatacaaatatagatactaggattaacgcagctaaaataattattgaagttgttacttttaatttattatcttccacataaatcctttgactttctgtatttctcttggctaacaatatataaatggctaatcctatactaactaaagcaagacttaataaatgcgaaattgaaaacggaccccagataacaggatttattctaaagaattctacaatacctcttattattgcaaaagcgattaagtaaattataaataattcaccttcaaattttttcttgtaacttcttctccataggactataaataatatatagtctaaaataaactcatatacttgtgcaggatgaagcagttgcccattatagttaatcccccatatcattatgtttgccattggtttgccaaatacatcgcagcctactctacctataccttgagccaatgcaatacccaccactgcaatatctgcaagttttaaaaatgatatcttactcttaatagagtatatgtatcctgcaagcacagcggaaacaattcctccgtgtatagataacccaccctcatttattttaaatatttctcctggattactaaaataaaatgatggattataaaaaagaatataaaataatctagctcctaatacacccgctataacaacaataaaaattagattaaatattatgtcttcatttattcctcttttttccccttgcttaattgcaaatgctccgcctgtaattgctgctactgctatcattagtccaaaaaagtatatatgtattgggccaaaactaaacagttccttcatactattaacttccttcctacaaatttaaaataactataaaactatttactacactttttcttggacttaccatctttattacaacagcatccccctgaagctttttttattactttgtgataaagaatatgcgcaacaaataaaactactaccaccgttattgctacttcaatgaccatcattcatacctccaactacaatatcttaatttaaaatttgatattttctattctaatggctaaaaatattagcttatttaactcttcttgctgtaatataatctggtctatctattgatgatatttttattacatcacctgttctcggcgcatgaatatatgtcccattccctacatacattcccatatgagtaggatttccgcccttaccatagaatattaaatctccaggctgtagttcggattttgaaacttcatatccatcatttatttggtcataagttgttcttccaaggctaataccaaagtgtgcatatacatattgtgtgaaaccagaacaatcgaatcctgtagaaggacttgttcctccccacaggtaaggagttcctaagaaatttgaagcatatgctattatgttattatcagaaacgggtgcagattttgcgcctctcgatgcattagtaactctaggtgcttcatttcttattttatttacttgattcatagttgcgcttacttgcacttgagattcatctacttttgatgcaaataatttttcctgatctttggcctcttgaataagcttcttttgatctgctatatttgtatttagacttataagcttgtcttcattttcgctttttaatgcaagcaaatcattatacttaacttcaagagatgtttttttactttctacttctgacttcttatcatttaaatcacttattacttgtttatcaagtccaattatttttctaattgcttcagctcttgttattaaatcactgaaactttcagattctaataagattttaagatagttagactgcccatttatgtacatagctcttactctttgatctaatacatcttgcttaacttctacttctttttcaacctgagtaatttgcttttttgttgtttcgatatcgttttctgttccaattatgttcttcttatttgcttcaatcttcatcatataatcttcgatttgattatccaactcttcaatgcttgcttcaagctggtgtcgtttatcttgtgcttcctttaaggaatttttattttgctccaattgagtttgtgcttgattagatgttggtgcagcaaatgctgaaacttgagtaatcatcactaatgctgtcgcaagcataaccgttttaattgtttttttcacttatatcgctcccttatttatagagtatattctcttttatttatagagtaatacttgtctctcttttgtaaattcaatcctatactacactaaaattgtgtagaaattatgtagattcatataaaggaatacattaccataaggaaacacataatttcttcataataataagttataatattacaaaaacacacaagtatatttaactaacatctaattggaggattactaatgattaaatttctagacgttactaaagtatatgacaataacaccttggctcttaaaaatgttaacttaactatagaaaaaggtgattttgcttttttagtaggctcaagtggtgctggcaaatcaacaataataaaaatgctttttaaagaaattgagccgacacatggtaagttaatattaaacgatactgatgtaaccaatctaaataagaatcaaataccgctttacagaagaaagataggtgtaatatttcaagattttaaactaattccaactcttaatgtctatgaaaatgtagcttttgcattaagggttattggtgtcagtactaaagatataaaaaagaaggtacctatggctttatcactagttggattatctgataaatttaggtcatttccaagccaattgtcaggcggtgaacagcaaagagtttcaattgctcgagctatagtgaatgatcctaatattttaattgccgatgaaccaacaggaaatctcgatcctgaaactgcaatgggagtaatggacacgctcgacaatgttaataaaaacggtactacaatacttatggctactcatgcaagagatatcgttgattcaatgaggaagcgagttattgctattgagaatggaactataataagagatgaaattagggggacttacgataatgaattttaataccttgaaatattatattattgatgcattaaagagtttaaatagaaatagaaccattagtatatcatcagttattacagtgacctcaactttatttataatgggagtttcaatgctattaatgcaaaatataaatataggaatgagtaatgctaaatcccaggttcaaatacaagtatttttaaataatagcattactaataaagatcaagaaaacttagagcaaaagttaaataatatttctggtatcaaaagtgttaaatttgaagataaatcagaggctttagaaaagtttaataaacaggtttctgaagataatagttctttattaaataattatgattcttccaataatccgctgcctaattcatttataatagatctagaaaatcctgaaatatcacatcaagtgataagcgcaatcgaaaatatgcctggtatagaatccattggcaatgatcaggaatttacaaataaaataatttcaatatccaaaaacgtgaaatggattggaattgctttattcatattaatggtatcagtttctatattccttattagtaatactataaaattagctatttactcaagacgtagagaaattggaataatgaaatttgttggagcaactgattggtttattagatggccgcttattattgaaggtgcacttattggtttgtttggagccgtatgttcaaatatattaatatactatctctataaactagtttttataaaaataaatgaaaatttacttttaataaacttaatatcaccatcttatattacgcaaaccctccaatggcagtttatattagttgggattttaattggaagtgtaggaagcttctggtctttaattaaatttttaaaagtataaatcataaaagatactaaaaagtgtattaaaaactaattattttagaattcaatacacttttttatatattaagaactatgaattatgattgcataaattactaaatttaattaactcaaattaaatttattctcattagaatattaattacctgtagcttattccatttggttctccttctacttttatagttttaataaccttatctgtgctattgtcaataacacttacagttccatcatacatattagtaacataaacatatttattatcagggctaactactactccatgagctccttttccagtttctattgttgcaactactttcttagttgacatatctatctttgaaacagtatttgatggtgcatcttcagttccttgatttgctaagaatgaatatttatcatctgattcaatgtaaacttgggtaggtccttttcctactgcgatagtaccattccctttatatttttatacaacatattatctatattttaaatttttgtaccaagaaattaagttcttcagataattcagcttgcctttgtgcagaattcgcaacttcttgagttgcggcagttgtttcatctacactatttaatattccttctgaactttctgccgattgctgagcagtagacgaaactgtttctattgcagcactagtttgctctatagaactaagtatttgatttgtaccatttgcaatttcttttgacatagatttaataaagactgcatccttttcatatttaaaagcagtttctaaaaaaagctcataatctggatttacattattatcaatatgcgccaatatctcttgagtgttattcgaaagattattgaaggcattgtttacctgagtaataacttcttgtatgtttgaaacattctctgctgactgttctgcaagcttgcgtatctcatctgctactacagcaaaaccttttcccatttcaccagctcttgccgattcaatggccgcatttaatgctaaaagatttgtttgcgatgctatatttgctatagaatcagccattactttaattttttcaacaacttttccttcttctattgcttttaatatattttcttgcttttctttatatattttcttagaaatatttattgattttaatcccttatcttttatttctgaggcacgtatctgaatatcattagaagcttgatcgcaatcctttgccttatttgataactcaatagaatttgaagttatttcttcaattgatgcatttacttcttgtgatgttgcactcaattcttctgtaccagttgttatttcctttgtagcttcattaatattgttcatttttgtagaaattccttctatagtgttatagatttcttcacttgattcttttatactgctagaatttgaaattattgttgatataagacttctagtgttttcagcagctttatttaaagcatttgatatttttcctatttcatcttttgaatagaaatctattctctgagttaaatcacctctacctagagcatccgcaaatactaaaaccttatttatttgttttgatattaatgttgaaatcaaaactccaagtaaaattgcaaatatgaaaccgaatataactataccaatcattaaatcgaatgaatttttaaatattaaattattagcactatttgcattttcagcttcttttatatttgaatctattattttattaatactatcaaaagttttatccctagcctcagttaccttttgaaaggccgtttgtgcttcatcatatctattagcatttattaaatccataaaatctttacgtgacatcatatattcttcgtgaagctttataaaatttgttaataatttttcttcttcacctgtttcacctgcatttttaaattcttcggaaatcatcatatcttcatttgttaatttttctatttcactttcaatatcctgttttttagttgcatcttttgttgttaaaagcgctaataaatctgagtgtatctgtagaaagtttgcttttaactcctcaactgtttttaaatgtttcaaattatcttcatacatagaggttgaatttgcatttattttttttatttctgatatccctctaaatccaatgatccctataaggaatgaaattaataagaagcaaaatataagcttttgtgcaagttttaaattattaaatattttcatattgttcctcctcagtttatatgttatctcctaattgaatacacacattattttgttttctaaatcattcttaaagtattaacttttaacaactcaaataataccattctattatgaagaacttatgaagaatattccaatttataataatatattcaatttctaattccctaattttacgctgtctaatataataaatttcacaccatgtaaatttaactttttttaatttaataataagttatcaaaaatacatataatcttcatatcttttttatataataattttacttatgataattattgacttatatatattggggattaaccatttaaaaggttcaattatttagttaaacattatttaatgttttaattttagattcgaggtgatttattcttgaaagatatatcgatcttattagctttttcagcaggtttattatcttttttatctccatgcgtacttcctcttgttcctgcatatataagttatttaacagactcttctataaaagaattaaaggaaggtaaaacaaaactttttactttatataaatcctttggatttgtgttaggtttttcgattatttttattctaatgggggtttcagtaacatctcttggtaaattatttattactcataaagatttatttagaaaatttggtggaattcttataatcgtctttggtctacatacaactggagttttcaaaatcaaactattttatcaagaaaaaagatttttacactttgataaaattaaaggtccttttagttcaataattattggaatggcatttgctgctggatggacaccttgcattggtcctattttatcttcaatacttatttatgctgcaaatatggattccatggataaaggaattttacttcttataatgtattccattggacttgctgtcccatttattctaacagctctggctatagagggctttgccgaacaatttaaaaagttctcaaagtatttacctattgtttccacaataagtggcattttaatggtcataatgggtgttatgatttttacaaataaattagcaatattaagtcagtattcaagttttattaatttttaaattaaggagaaaacaaatatgaaaaaagcattgatagcagcaattgtagcagtagcacttatagttttttcagtttacactatttataattccgaatcaccaaattcaaaaactgactcatccatatcaattacaagcgataaaaataatgtttcaaatcaaactattgaagtaactcctaataatattaaaaccaaagccattgattttaacttaaaagatttgaacggtaatgagttatctttaagtgatttaaaaggcaagaaagtgtttcttaacttttgggcaacttggtgtcctccctgtaaagctgaaatgcctgagatagaaagattatatcaagaaacaaaggatagtgacttagttatagtttctgtagaaatcggtgagccattaaatactgttaaatcatttattgatagtaacaaatataactttaaggtacttatagaccctgatcaaagtgtagctacaaaatataacataacttcaattcctacttcatactttattgataaagacggaattatagtttctaagcatgttggtgccatgaatatcgaccaaatgaaagcctatataaaaactttagataaataataactagctttaataaaaaatgaattagaagtctctaatatgagattattctaattcatttatttacctgatcatcttttttctttgtaattgtaaatttcacaaatattaggccaatgactgttatgactagccttatccaattatcgttaatattaattatgtcatagctaacaagtgcctctaaagctatagatggaacctttccaatcaatgttgcaacagtgaatattgtactatcaacattacttattgatgctgcaagtgttataattcctgatggtataaatggaattattcttccttgaaatattagtagccccgcctctcttccatcacttttaactattctagaaattaacctatttctatctgtgaatttttcaatcttccttttaaaacctaatctatagataataaaagtaatatatgctcctattgtttcacctaacagagatatgaaaaagccattaataggcccgaagaaaactatgttcgctcctgttataaatactgacggtaatataccaacaagggaaatgcctatacttattattagacttataggtatcgcaatagagctattatttctcaagatctccactacatcatttatattgaacatggatttctcctttattaatattctaacttaaaatcttaatttctaaatactatctatttatcacgtactatcttgattactatctgctattttacaacattcttataatcaattcaaataaaataagactcaaattttagcttttacagcacttgagccttttacatatatatggtacttttgcttaaacatatttaaaatgattgtgttacttttcttatccttctaggccacttcactatttgttcctttgaataataaataaattgcatatatccctgctataccaacaatgccacaaactatccgatcgagccaagacattgttacaggtgcagaaccaaaggcaagccctatgaaatcatctcccaaaaaacctattattcctaatcttatagcagctgcaacaaccaatacccatgttattgttctcattttcattcactcccttttattaaatatattttatgttatgtaagatttaaattacaaataataatttagatattttaaatacctaatctattatttgtaaatggatatatattatacaattatcattctgattcctcatattttatttgtattttgtaacagttatccatttcaactcatatttttaagtgtatacctaatatagttttttcgtatggaggtcagcattactattacaaatgaactaactaaactgtatatactaacttttaaaaacaaactgtttctacaatgtaatattgtttgtataatgtattaaaaataaagaggtgtttcttatgattattacaccagatattcaaacacttaagtttaaaatgtgtaaaggagtaaaatactttgaattgtttgctgaacaagtagaacaagaaatactgcctggtgtgtttattaaaggttggggatacaatggtagcatacctggacctacaattcaagtatatcctggcgactttgttaatatcagagtttttaataaattacctgaatctacaagtgttcattggcatggacttaatgtaccaaatgacatggatggtgttcctgctgtagagccttcgcctgaaatctcaccaggtgattattttgactatagatttaaaataacgaatccacctggcactcatatgtatcatgcacatgttaatgttgttaagcaagatatgatgggcttacttggaggttttgttattttaaatcctaataaaacaaaagttaataaggactatttacttttaatgcaggaatggcatcttgttggattaaaaaaaggagaagaagttagacctgatatttacaagcttgatccatttactaatgattttaatatgtttactatcaacggaaagagttttccagcaaccacacctatgccaattgaatatggtgataccgttcgtttaagacttggcgcaattcaaatcaatcatcatcctatgcatattcacggtcatcaatttaaagtcgaaaatgctgatggaaatccacttgataaagataacatgattttaaagaatactattttggtggcaagtggagaaacatgggatgtgatatttaaagcaaataatcctggtgtttggcccttccattgccatatatcacatcatatgtccaataaccttaccaaaggtacaggtggtatgtttactactctagtttatacatcaaataaatctagttgaacagaaattccttattcatactataattctaagatgaaataaaaagaagttaatggttccacaaaaaatacattaacttcttctttaatcttcctactttatataaaacacttttcctaaattgttattctattttgttttgattttcattaacttctttcttctcactacaacagcttccatgcttgcctttaaacatcattcccatcataagtaccatcattattggacatatgaaaggtgctatcccacctatagctgctttaagtcctgttccaacacttaaaaaaggaagtgctgctacaattataaacggtaatccacaacaaagcaccatcattaacatatgctttattggattgtgttttttatttccttcatttttattatttccatgacaattcataataaattccccctcatattctcattataattaatgtttaagcttaactactttaccacttaaaattgatctatttactatttctttaatatcatctcttgatatctctttatctctatagattactttaattttctttgattctaaactaacatcaactcctaataaaccttgaatggagcttaatgtttttacaacattcattagacacctatgacaaagcatattttcttgtttaaaacgtaaactatagcttttcatcactatcgcctccctgtaaatacattataaataaatgttatgaagatattgtgtagataaaaataaattttaaatattaattaaaatttaattatcaggataaatgtaatcctctatataattagtgcttatattacataactttcacaataaaatctgaatttctattaaaatttttcggtctcatttatggactcaatgctatctgtaattttaattattccttttatcattcccatccagcaactaaactctatgtcttcatctttggggataaattctattatattttctcctgatttgaaatctttatctatattgaaagatggtaatactattccattattacacgaattaagttgatctccttcaaatatcaacttaacaggaatatctttttgaacataaataacatcaggggtataaccattattatctactgttattcttactacctgaaccccattttcaatagacgcattagctatatttaagcgagatgcattagctttatttactgataagttatgttttaatttttcactcatatcaaaacttgatacaatagtactaaataatagaataattgcacctatagcaaataatcttacatattttctgttgtttaaacatttatatattgctttattaacttttcttataatattcatgcttgtcacctctataattataaatatattatttcagaaaaaagtcgcttattatatagtaaagtataataaaaagttatgaagattctataaggatgatatatgaaatttctgtcaaattatattggtagttatatgctattgttaaaacataataaatcatctatattttaaggaaataaatgtaaatttaataattctcaaaaaaaacaaaaaaggtatcttaaaatcactttttaaagtgtttatagataccttctttttttatgtagtttgtgataaaaatttatgtattaattacttttgtttatgcatactgtaaatacagtttccttatcttccttactttctacatctattgttccagaatgcaaagttaatatcttctttacaagtgtaagacctattccgcttccctcaattttatgtctacttttatctccacgatacattctttcaaaaacataaggtaaatcttcttttttaattccaattccattatccttaattttaatgataactgagtttatatcgctactaatattgacccatacagttccatttatattgttaaatttaattgcattagatataagatttataaatacttgtttcaatttatcgtaatcgcctactacaataaaatttttaccttcttctttattaataattaactttatatttttttcatcagcagcaatattaaaatcactaattacatttgaaataagcccccctatattaacccttcctaatttaagcactatttcatctgactctatttgttttagtgaattcaaattatttaaaagcttgccaaatcttattacttcatcatttaagctattaagcttatcagcagttacaggtataattccatctatcattgcctctaaattattttgtaacacatttagtggagttctaatttcatgggatatatctgaaataagacgctttcttaataaatcctgactatttaatttctcacctaaatcatttatgctctcagttaaattccgaatttcttcaatattactttttatatttgatctagaattataatttccttttgataaacttacagaagtttttgaaacttcttttattggttcagaaaattgcttggataaaatcaaacttattgctgcaactattatcagtgttaatactccgctaaacacaatactcttattaatttgtcccttgaagcttatgtcttcctgtgaaagcagaacaggcgaatactgtccgacaataatataccctactgtttttccattaacatttatatcaaaagtattggaagtatacactccagtttcttccttaccatttactgtcatatgatttttattttgtatatcttcatggttcatttcccatacaacttttctattatcatccaaaagacttaaacagtaattactcatatacgcttcatgcatcatttcttcccctgaagtactattccatccaccatcacttttataaacttgttgaaagtattctactaaccttgtatttctttgagtttgtatcttctccatatacttattgaatgtattcgttatagttatatttactaataaagctgacaaaagtacagcaactacagagcaagatataataattatactaagacgctttctaatactctgcttcataatttatcaccaaatttataaccaatttttgtaacagtaactatgtattgaggagacttggtatcttcttcaattttcttacgtaaatttttgatatgaacatctatacttctatctgatccatcaaattccatcccaaaagctctctctattattgcttcccgtgtaaatacttttccttgatttgaagccaaaatatataatatatcaaattcatttggagttaaatttatttcctctccactcaatttaactaatctcttatcaacatcaattattaatttgttatcattaaaagaaattacgttttcttttttacatccaactctcctaaataatgcatttacacgagcagttagttctcttgggcttaatggttttgttagatattcatctgctccaatatttaagccttcaattttatcgcttaatgtacttttagcagttagcataaaaatatatacatctgatatttttctcaatatcttacaaacttcctcaccatcaatatctggaagcattaaatctaaaattacaagatcaatcctttcttttctaaaaacttcaattccatctaatccattttcagtggaatacaccccatatccttctctttccaaatatgcttttacaacgtctgatacgcttttttcatcttcaattattaaaatgttgttcataatattccccccatatagttaattttaatattactttatcatatatttaataatttaactaaaaattattcctccaataagttcttttattattttaaatttcaaattctgttacacttaataaaagaaagtacttcaaaatgataaaaaaatcattttgaagtacatccttaatggcagcatcctccaccgcctttgaatactctaaaaactataaaagcaacaactgcaattattaatattgtagcaaccattttcctcatccttcctaatatctatcatttgaaaatgattcttattgtacattaaaattatgtagaaattatgaagataatgattattacaaaatagaatctttagtaattcttatattaggataaaaatgctttagatactgacaaaactacatttactacttggctaggataaattccaagaataacaagtactgtcatagatatagttaatgctaattttgtacttatggataccggaattgattcaagtttagtaggactttctccaaaatacataaccttaacaactttaagatagtaatatactgatataacgctcataccaatacttaaaaatgctaaccatatctgtcccttttctattatagataagaataaatagaacttgcctataaatcctgctaaaggtggaattcctgctaaagaaagtaaggaaataagcataacagcagctaaaaatggtgatcttttagctaaataagcataatctttaatttgatcatttcctgttgcctttgaaactgcaattacaactccaaatgctcccatgtttgcaaacagataaaacaaactataaagcaaaattgatgcgatgccaagacttgaattcgcaataatccctagtaaaaaataacctgcttgtgaaatgcttgagtaagcaagcagccttttaatattagtttggggaatagcaactaaatttccaagcactaaagttataacagataatactattattaaatcaatccagtagctagacgcagatgacatgccagtcataaataatcttaataaaactgctaaacctgctgttttagatgctaccgctaaaaatactgtaatcgaagtaggtgctccttcataaatatctggagcccacatatgaaaaggaacaatggctattttaaaagcaaaacctgcaattaaaaatatcatgcctagtatttctaatggtgctatctgtcctgtcaccagtgcttctgcaatttctttaatagccgttgtttgagtaatcccatatattaaacttaatccatacaagaaaattgctgaagacattgcacttaaaataaggtattttaaacttgcttcttttgatttatcatcacctttataagcaattaaaacgcaaaatgatatagtcattaattctagccctatatatattgcaatgagttctcccgatgataccataatcatcattccaagtagcgcagacacaattaatgcatagaactctccttgttttgaaactagatgatctctagaaattaacactgttaatactgcagctatcaagaaaagctgtttaaaaaaagtactaaaagaatcattaatataagctccaccaaaaagagattgtgactgactcccattcaatagtgcctcactaaataatgatactattaaaattataaatagacatattcctgtaaataaactaagcttttctttatacctttgcagtgataaacttgctatcaaaagtacaagacataaagctgcagttaaaagttcaactatataactcataattaaaatcctcccattatcattcctatgtctgatatcttacccataagtgacattgctccactatgaataaggtcaattagtggtgaagggaataaaccaaaaaatattaatacacctgcgagcatcactataggtatcatttccactccttttgcatcctctaaatgattccattcttcttttcttggaccaagaaaagtgctttgaattacctttaatatataagccgcagtaataacaattcctagaatagccattattgagattgctttaaaaggtattactgaaaataatgttcttggttcatcatgagatcctaaaaatattagaaattcagcaacaaaattgtttagccctggaagtcccaaagatgcaaaaccagcaattataaaaccaattgccactcttggcatttgatgtattaaaccaccaaacttagctatttctcttgtatgagcctgatgataaatatttcctattagcgtaaagaacaatgctgtcataataccatgggcaaacatctgagctactgctccatctattccttcaaagtttaatgaagcaattccgagtagtacgtaccccatatggcttacactagaataaccaattacaaatttcaaatccttttgagccatagcaaccatagcaccatatactacattagctattgatagcactgcaattaaaggaacccagtattttgcaccttctggaaataaaaacacccccgcgcggataattccataaccacctagtttcattaaaacccctgcatgaagcatacttacagctgttggcgcagctacgtgtccatctggagaccatgtatgaaaaggccacataggaactaatataccaaaacctattaacattaggaaaaaagtaaatttttgaaagctggcgctatattcaatagtactgagagtttgtatatcaaaacttcttattcctaaattattagcatatacaaaggtcgcaataattccaattagaataaatgcacttcctactaataaatataaagtaagtttcattgcggcataatcttttcttgtacttccccaaactccaattaagatatacattggaataacagctatttcaaaaaatacgtagaataaaaataaatctcttgaaatgaataccccaaaaacacctgcaactagtaaaagcagaaatatgaaaaattcctttattcttttttccattttccatgatgcaaaaacacctgcaaaaataacaatagctgtaagcaatactaaaggtatgcttaaaccatccgcccctacagaataattaattccgaaggcaggtatccaagaataggtttcttgaaattgaagtcctcccatttccttattgtaagtaacaaaagctataatcgaaagcaacaatgaaataaacgtgacaattgctgctgtaacctttatttcatttttcttactttctggaagcaaaagtattatgattataccccaaatgggtgctaataatattgatgttaatatcggaaattgcatctacatccctcctaaaatcggtgctgcgagccaaataattatcaaagcaattgttatgaaaaagattagagcataattttgcactctgcccgaatgaataagtctaagcttatctcctattctgcttatgaaagaagtcgtgttatcaaaaattccatctactacgttacgatcgcaccaattaaaaagataagaaatatttaaaactactttttcatatatccattgataaagttcatttatataatattgattaaaaagaaattgatgaattgctctaaacttcacacttagagcttcacttgatattattttcttaccatatataagccacccgagcagtattccactaaaagctgctgctactgattcactcataaccattaaatttgcttcaggaatttgagatgtttgaaagtatatatatgaagcaaatgtttcatttataaaaccatagaatactgaaaaaactgataatatgattaatggaacagtcatacaccaaggcgttttatggacagaatgtttttctctttcctctccaaagaagactattaaaactaaacgagccatataaaatgctgttaaaaatgctgtaattaaacctaagtaatataaaaatatatagccatgctcataagttacagttaaaatttcatccttactaaaaaagcctgatagaggtggaattccagctagtgataaagatgcaattataaaagttatacttacaagtttcatttttttaattaagccgcccattttaaaaatgtcctgtacaccaatagaatgaataatgctacctgcacctaaaaataataatgccttaaaaaatgcatggcttgtaagatgaaacattccagaagtaaatccgcctactcccattgccataaccatatatcccaattgactcatagttgaaaaagccaatattctttttaaatctctttgaactattgcaattgtacctgccatgaatgcagttattccaccaatgtacgcaattactaaacttacttcatgtaaagaagaaaataatatataaccacgcgctaaaagatatactccagctgcaaccatagtagctgcatgaatcaatgcgcttactggtgttggtccttccatggcatctggaagccaaacatgaagtggaaattgagctgactttgctactggtcctgcaaaaattaataatgctattatagttaaataaacaacatcttgatatgctggaatacttgcagctaattctctaaagttaaaagttccaaaagccatgaaaaggcaaagcattccgactaaaaatccgaaatctccaactctgttagcgacaaacgcctttttattagcctttacagctgaaggcctgtcatagtaaaaaccaattagaagataagaacataaccctacgagttcccagaaaaagaacatttgaaaatagttattagaaattacgagtcctaacattgagcttgtaaatagagataaattcgcaaaaaatcttgaaaaacctttttctcctttcatgtaacccaaggaatatatttcaaccaataaacctataaaagtcacgattataagcatagttgctgtaagtggatcaattaatactcctacttcaatcttaattggagctgatagccacgaaacagcatattcaacaggtttatttatgctaactttcgaagtaataacctcataaaaaacacctaaagaaaatataaaagagagaaccatcccacctattgcaattgctgaactaattactttagatttttttgtaataaacccaataattaaaaatgcaattgcaggaaatacgggaatcatccacgctaaatctataaatctcatcataacacctaccattttaaaatattgaaatcttctacattagatgtaggtagacttcgataaatatttaagataatagctagacctacagcaatttcagctgctgcaacaacaataacgaatatagcaaaaaggtgtcctgtaaccttttctggtgctaaaaatctattaaaagctactaaattaatattgactgcattcatcatgatttctactgacattaatacactgataacatttcttttaacaactgctccgtaaagaccaatacaaaatagtgctgctgcgagtattaaataaccttctaaaccaaccatctaatttttcactccttttgctaaaataatagcgcctaccaaggctattaataagagtaatgcagaaacttcaaagggaatcatataatttccaaagaatccatctgcaatagcactaatggtattttctatatttaaattcttataagtaaagttactacgtaaaattaaacgtgtaataagcccaaagaatcctaaacaaaatgctaaacctgtccatcttaatttattaaagggattactgtttttcatatcattttttcgtgtaagcattatagcaaatacgattaagattgaaattgctccagcataaattaaaatctgtgctaaagctagaaaatcagcttgaagcaagatgaaaaccactgctatacctatgaatgttaaaatcattgataaagcactatggataatattttttgaataaacgacacctatagcaaaagctataattaaaaatgctataggccaaaaaacaaaagctgaaatcattataaatcctccttgttaagaatatgaagtaaatattggtcattaatataatgcatgtttctcatcatgcaaaaaagtattctgacctgttacttctttgaatattcatcaaatagtgttaacttagtttctgctctactgtaagcacttagttcaaaatccgaagtaacctgaagtgccttagttgggcagctttcaacgcataatccgcaaaaaagacaatattctaattgcatttcatatttagttaaatgttttttattattttcatctttataactttcaacattaataactctatttgggcagctcaaagcacaaatgctgcatgaaatacatttttctgaatccagtctaaaagaacaacgagaacgcaatggaagctttggatgttcttctggatactgctgagtaatatttttttcaaataaatgtccaagtgttactctaagaccatttaataatcctttaccaaacattaaattcacctcttaactaattttggcatattcaagaaataataagtcatcatgctagtctatttctagtcatactacgtcagcatttttacctaataggcccactatgagataaaaatacttccttgtctgactgaaaatatacatcgcatcatggacttattattttctttcatatacctaactgaaatattttaataccaattccagttagtaaaatgtttattagagaaataggaataagatatttccagtttaaagacatcatatgatctaacctaaacctaggaaaagtccaacgaactaacataagcagtaacactattaagtaagtttttaggataaaccaaatccaagaaggtaataacggaccactagctcctcctaagaataaagtagctgtaagtgctgaagtagcaaacatatttgtatactcagcaagataaaaaagtgcatatctcattccgctatattctgtgaatggaccagctactatttcctgctctccttcagctaagtcaaaaggagctctatttaactctgcagtagcggcaataagataaataataaatgcaacaggctgtaaaaaaatgaaccacactttattttgtgctgttataatttctgttaagtttaaagaaccacttatcataactactccaagaagagaaaaaatcataggtatttcataacttatcatttgagcaactactctcatcccacctaaaagggaatacttattattagatccccagcctgccattaatataggtattgaagaaactccagatatagctaagaaataaagcaatcctaaatttaaatttacagcgaccatattttttccaaaaggtaacacagcatatattaataaagcaggaaccataactaacaatgatgccattacaaaaactaatttatctgttttttctggaataatatcttctttacctagaagcttaacaacgtcagctacactttgaaatattccttgtggcccaaatctattaggccctggacgctgctgaagataaccacaaaattttctttctaaataaatcaaaaacatagcatttaataaaacaaaagctacaatcccaataaaataaactaagctcataataatacttacaaaggcatttggtattgccaatgccgaagttaaacccttaatccaattagatatgtttaaaaatatattctccatttctacctccaagctacctatcaatttcgcctaatataggatcaagtgatgcgagtattgcaacagcatcctgaatagtgcttccagtcgccatttcaggaaaggcacctatattaacaaaagatggtccatgaatgtgaattctataaggtttatcacatccatcacttactatgtaataacctagcacacctttagctccttcaatttgatgataaatatctcctttgggtggttttattagtcttggaactttagctaaaactggaccttcttttatttgctctagcgcctgtttaattatttttatactctcttccatttcatcaatacgcattatccatctttcatagcaatcgccatctttaccgacaatcactttaaaattgaaacgatcataaataccatatggcgcatcacgtcttaaatctaagtctataccagaagccctaaggtttggacctgttaaaccataagctaaagctttttctccactaattattccaacacctttagttcttgcttgaaatatttcattaccagtgatgattcgttcatactctataaagctcttatccatatcattaagaaagctttttaagctaggcataaattcctcaggcagatcatagcttactccaccgatacgcatataatttgtagtcattctagaaccacaaaccatctctaataaatccaaaactttttctctatctctaaagaaatacatccaaggggtatgcccatttaaatcaagagccatacttcctaaaaaaacttgatgacttgctattctctgcaattcagccattattatacgaatgtattctgctctttctggaacttcaatcccagcaagcttctctactgtttgaacgtaacctaactcatttaacattccagataaataatctaatctatcagtataaggtataaattgagtataagttctggattcagctagcttttccatacctctgtgcaaatagcctatgatattttctacattgacaatatgctcaccatctaaagtaaagattgctctatatacaccatgggtactaggatgctgtggtccaaaatttaaagtcatttcttcagtgtgcaactctctgtcatattccattctcaaacttcctcctttctaccttcgcttttcaaccttaaaatcttttctaagcggatgtcctacaaaatcatcaggacataatatcctttttaaatctggatggccaataaaattaattccaaataaatcataagcttctctttcctgaacatttgctgcaagccaatatttagttaatgatggaatttcaagcttttcattaagttttaccttaattctaatcagctcatgagtagttaatgacataaaatgataaacgcagcttaatacatcatcttcaatagctgttaaatcaactaaaaaatcaaatccatattgctttaccttttttataacgtctagaaatttacttgcttctgtgtgaatagcaatctgcgtattttctataatttcaatatcttgcttatattctgctttcagttccaagattagattttcacaagttttactcacttcttcccacctctttcggatgaataattttttcttttaaagttaaaagcccatggattaatgcttctggccgtggagggcatcctggaatataaacatctactggtaaaaatgtgtcagcacctggaacgacattataggaatctacaaacggtcccccactagttgcacagcttcccatagcaattacccacttaggttctggcatttggtcataaatctttttaactataggtgccattttttcagtaattgttcctgcaacaatcatcaaatctgcttgtcttggtgaagcacggaaaacttcatatccaaaacgtgcaatatcataacgagcaccccctgctgccatcatttcaatagcacaacatgcgagtccaaatgttaacggccaaaaagaatgtgcacggaaataatttaaagtatcatctaatttagttaaaataatatttttttctatttgctcttgaatctctttatcttgtttaaaatttacttccactctaatgccccctctttccacgcataccataacccaatgattaaaatacctataaaaataaccatttcaaaaagtgcgaataatcctaatgatttaaatttcactgcccatggcaataaaaatactgtttcaacatcaaagagtagaaatactaagccgtacataaagtaactgaccttaaatctaatccacgttgaaccagtagtttcaacaccacactcataagtagataatttttctttatttggcttcttcggtcttactaatgaagccgttaataagacgaccattccaaaaataaatgaagctataagaaaaattccaataatcaaataatcttgtatcatttttatcccctttcaatttactttaaaatcaaaatcaacacgttcaaaccttccttctacaggtacaaagtctaaaagttattaataattttatatctgctcacatattaacaagtttttatgaagttattatgtagaaatcctataggttaacacataattttcaaattattccacatgtgccgatgaaatccgagacattattgaagtaaatttaaagaattttttattaaagccattcataataaatatcaaaaaaacagaggtttataaaatacaaacttctgttttactgcattattcctattaataagcgacttattacacatatttaattatttaacttttattttttatcatacaaaatatttataaagattttatgtagaaaaaattttcgtaaagctataaattatgctcttattaaatctgaaaattaaaattcttacaaatcgatcaatatgtattaagataactccttttctctatacagaaaaagtcatgtaaaagaagaattatctatactccttttacatgactttttactgttacctatgatcttaatgtactttttattctattatattcatcttcacttatttctccgcgaacaaatctttcatttagtatatttagagaattatctctaacactgcaaactttaagctttttactttcttcttgattgaaaattaaatatataacagcaataattaaaattattggtataatcatcattccagaccatcctcccatcatatctaattatccttccattctcatattatcattctaaatttatttcgattttttaaaatttaatgatactaattcctcatcatgctttgatgaagttttgccatcttttcttttcctacagattgcatcatatttgccatagatccatatccgttatttttcattacatcaatcatcttgttataatcctcatcacttatattagacattaaatttttcatggcattaaaatctctattttccatagcatttgcttcatcattaaaaccattctctttcataagttcaatcattttattgatattatcatctgattgcgcccctgaccccatcatgctcatcattgttcctctataatttgatgatgatttaacctcaccattttgcacattcatcatttgtccattaaatttattaaaccttgtattattgttatctgccgcatatgcaagtgatattccacttacagttaatatacctgctaatgctagaatcataactttctttttcattgtgtatcactcctttaattttcttcttatttatatgcttattttactactcaattatggagtaattatgaagataatatatttttaaaaaatattctaattatatataataaaaggtttaagtgctatattgattataacacttgaaccttttgcatattcatagaatttttataatttcaaatcagacagaatctaaattttaatacattacatcataataattttttacattataattgcaattatcaatccaataactacagccaaatgatattttagaccaacctgtcctataagtcccatactcctaccttttgtttgagcacttttttcatatgaaagaaaactcctaattgatttatagggatatattaaaattacaggtaataacacgacaattggataaatgtgtattaatactaaacagactgttagtacaagtaacattattatattaaaaacccaaagcttatttgcattttttttacctatcataataggcagtgtttttcttccagcttccccatcctcttccatatcactcaaattatttgttagtaatatagtactaataaataatactgtagggactgcaactaagattgtatttatattaaatatgcctgattgaatataaatcactgtagtagttataccaattcccatagtaactccagatatgatttctccaaatggggtatatgaaataggtaaaggaccaaaagcatataaaattgaaataagacctcctattatagcgactagtaaaatataatagcttgtttggctagctaaaaaaataccaatcataagagcaataaactgatataaggctattataaataatacttgcttagatgtgatttcaccactaactagagctttttcatctccactcttattaatgtctgctccacgtttatagtcaaaatagtcattaatcatattagtagcactttggatcaatatcatagcaattgctaataatataacatacaaagaatttaactttccaaaagcatactttgaataaactgaacctaaaattacaggaactaatcctgcaacaagggtttttatatccataagttttattattgttttaaatcccattgatctcttctccttatcaagatctttaatcttttttattttataatacaaaatatttgtaaagattttatgaagaaatcgatcatagtaatacaaattatattttaatctattttctcaaaggtttagttcatagtgattcgatttaatctattagttattataaatcaaataactttacagataattaagtttattatttaccactaatatacatagagagtcatgtaaaaaagtattaagtctttcttttcacatgactataattttattattctataatattcttcctatatcactattttaattatcttctaattatatatttattttaccgcttaactgtgtaagaattatgaagataccatacatctaatgattttttatatctgcatttaataaaaggtccaagtgctatttttattcagcacttgaaccttttgaatattataatttacttactcttccttttgcaactaataaattaaatatgaaaaatcacttaaaattatattcagtaactatgatttctctattcttagttttatcgttaaaatattcgtaaaacgatagtgctaagaaactacctgtaatattataaacattattaaaacctaagttttgtagtgctaatgttgcattataacttctttgaccagttctacaatgtaaatatactggtttatcttttggtatctcatttatcctttgtctaagttcacttaatggaatattaattgcgtttttaatatgtccattagcatattctcctctttccctaacgtctattatataagcattacgttcaacaagtcctctgactagatctatattaacctgcttaaaatcgccatttaaaagattagaaccaacataaccagcataattaacaacgtcttttgctgtagcaaatggtggtgcataacataattctaaatcttttaaatcttctactgttccaccaaactttatagcagtagcaattacatcaattctttttgtaacatcacctttacctatagcttgagctcctaaaatttttcctgttggaacttcatataataattttaaatgtacaggcgatgaattaggcattattccaactttatctgtaagtattactcttacaacatcatattgtatattcatgttgagaacatttataagtgcttcatttaaccccgttgatgctccattataatcaaaaacttttatagctgatgaacctatatatcccttatttaagcctttctttccatttatatgatctgcaacagatcttgcctgcttttgagctgggcctgcaagggataatttcacattggaatggattaatgaattataaacttctatagcatctcctactgcatatatactatcatcattagttttgtaatttgtatctacttttattgctccagtttctccaatatctaactctgctccttttgctaaggctgtttctggtgatactcctattgccattacaacaaccttcgcactaattctttttcctgatgatagtatcaccgtatctttttcaaacttttcaactttatctccaacaattaaatttatactattatcatataattctttatgaaatatttgaaccatatcataatcaaaatttcttaatatttggtcagtagcttctataagtgcaacgttgtatccagcttctcttaagttttctgctgcttcaactcctatatatccaccaccaataactgcaatatcctgtgtatcaattgatttaacatatttatttagtttatctatatctacaacatttcttatggtgaaaatattaacttcttcaattccagaaatattaggtacaattggcttagctcctggtgataatattaacttatcatagttttccttatatgtttcaccagtttctaggtttttaacggttacatacttctcctctttatttattgataagacctcattattcacccttgctttaatattatattgaacaagaaatttttcaggactcattagaaccaacctatcagcctcgtctattattccacttaagtgatatggaagtgaacaatttgaaaaagatacatgaggtcctttttcaaacattattatttcatcttcttcactaagtcttctaagtcttgctgcagcagatgctccccccgcaactcctccaactattaatatttttttcttcatgaccatttcctcctaacctcaacttataatttttaatacaaatcgttattaattatgattttatacctattaagctctatgtattttctttttataattattagaattctgctaattaagcttataacaattagtaaaaattctgttgagttaccttatgtttattttccacgattatttacctatttccttccatgactttattatatataaatctttagaaaatataagtgacataatcacataaacaaattataacaaaaaagagaggcaaactaattcatagtctttctctctaactaagctaaagttcataaaggacaacaaatataacatcttattgtctgcttaatacttcagatatgaatttttctttccctactctatccattactgtcgagattctttctccctttactccaatttctttatagcattccataatcttatcaactacaaatactatatctttttcttcgaatatctttcctaaagaatcccctattcttattcctcgtccaaatcttccaccaacaaaaatttctgcacctttttctctaataccaactgcattggttctacatagtctagaacattcaccgcaacttacacataattcttcatgatatactacttttctatttactacctctaatgctttttgcctgcagcctttaacacaaattccacatccaacacagttgtccaaattaaattctgggattgtctttcccattattccaatatcatttatattagcttttgcacaattatttgcacaaccaactattcctattttgcacttatgaggagtatctgtagcaaaatatttttcctctagttctctgcaaattgcctgagtatcaatgttaccatgcagacatacagttcctttgcatgcaactaatggccttatcttttgaccagttccaccatgacgcagtcccaaagattttgcttcttccattactttttctgcatcttcatctttaatccaaggaacttcaatttgaagtcttgttgtaagtcctgaataccctcgtccatattttttagcaatcccatttatgttgtttaattcttcaactgtaaaatttcctgctctacttaaaaaccttactgcgtaatgttccctatcattttgtaataaaaaacctactgccttcatttctttttgtctcttctcattaaccataataatcatacatctccctaactatgaattactaattctttctcattttgtttcagtataatagatatatgataataaataaaatataaatacctaatgataaccattaaaatatttaatggttcgaaatttaaaatgccataataaatattcgtacacccacaatagctaacgcaactgcaaggcttctaattatcgctactccgtgaatcttttttgaaagcgtcgcacctaactgcgctccaaataatacacctatagataatgcagctgtttggataaagcttgactgaagcactccattcactatatgaaccatagttcctgataatgacattactgctagaacgaaatgcgaagtagcagttgcaatatgaacggggtaatttaatatattgacaagtactggaacatgtattattcctcctcctatacctaaaaaactagacataaagccaacaaaaatacttacaactattccagttacaggattatatgaaaatgtatgctctatcccttcaatatctaccactgttcttgtaatatagccattcttaactactaatctattttctgctttctcatccttggtccttaatatcaagaatacggatataataaccagtaacacaccgaatatcccattaaaaagctgccttggtacgtatgatgttatcactgatcctaatattgatcctggtagagttgctattgcaaaaattattcctgatttataatcaatacgtttcatcctcgaataagcaaaagagccagataatgcattaaaaaatacaactgctaaagaaatactcgttattgtatctggactcttatctggatataacaataataaaataggtaccaatataaagcctccacctgcacctattagagttccaaatgctccaactaaaaatcccaagggggttaaccataaaaattgtatcaaatttaaaaccttcttccataacaattatgcattataattaaacaagtttttaaaatttaaaaactattaattatattaatataactctcctatattatacactatcttttgaccattttggatataagttttaaattttatatttcaaaacataattttgtgcttagttccttactttatagtaattttattatatccaattgcttttttagggcattcaataacacactttccacattgaatacaatctggatgacttaatatatcacctttatggttatatggtactaaaccaagcggacatttcttttcacataatttacatgaaatacatgaagatgatacatgtaatacccttttgctccctttaagctttccaataattgatgctagactccccataggacaaaagttacaccaagctctatgattatatactaaagataatattattccaattatagttgttacaacaatcattctataaaataccattcctataccataaaggtttccccaatttttatatacacctgaaataaatattaccatcattattcccaacattacagatctaaaataatatgatttaaataactttggcggtatccttttattaccaaatttcgagaccacattatcataaaaatttcctcttgggcataaattcccacaccaaaatcttcctttaaaaatagaaacgattataggtgctatcatacaaatgactgctacaaacccaaaccttaaatcaatcatacctaacactatgaatgtgattaatagtgtaaatgaatacctcttccataatttcaaaaatttttccactaaacattcctcctatttctttcattattctaaagtttaaaaggcaactaaacttctaaccttacttgtttggctctttttattttataaaattgctcttctattatcagtaactttatcacacaataaaactatgtatatgttgcaatacacatttcacaattatggctgaaattcttgcaatatttttagaattgtgatgaagaattatttttgcgacatatatattaatgcaaaaaaagataagccgatatattattaaaatatcagcttaccttttacttaacattattctaacttcattaaattattttaaaaatttcagttattaaacaaattaaatgatattttataatattataaaaaaggaactctaaattgagctcctttttaacaaataaaattataaattttactctttataagtattccccttagatttgctattataataacttgcagctataaatattatccatacaatgactcctgctaaacttaccaattgagccattctaaaacttcctatcattaaactatctgttctcattccttcaattatgaatctacctatagaatacaatcctatgtatgtaaaaaatactattccattttttttgcattttctgagcataatcatcagtattataaatatagttaaattccagagagattcatataaaaaagtaggattgtaatataatccatttatattcatccccttttgaatgaacataggaaaatgcttaataaattcataactaactacatccccatgtgcctcttgattaaagaaattcccccatcttcctagagcctgagctaaaataattgacggtgctgccacatctgcaaacttaataaagcttaattttttaactcttgtataaattaatgctgttcctaatgcaaaaattagccccccatggatcgcaagtcctccatttcttatattaaaagcattaataatattatctttatagttatcaaattcaaatattacataatacagtcttgcacctattataccaattggaatagataataatacaatgtttagcaaattatcataatcaacttctctccacttacaattatattgagatattagtattccaagcataatacctgttgcaattaatatcccataccacctaatatcaaatcctccaattgaaaatgctactggattcataatttcacttccttatcttctcattttgtattttttgtataaccatagcacaagctcctacagctatagatttatcttcaaaatatccacccctaataaattgaatattattattttttatgtgacacttctgaagagctatttcttttgtagtttcataaaacaactttgattgttgtattaatgggccacttaaaattataagctctggattaaataacttaatataatttgaaagtcctattccaaaatataaagccgaatcttttataatacccatagcctcttcattttctctttccccaaggtcacaaacatctatataattaatatcatttaaatttttctttaacaaagatgattcattttcttttatttcatctataaacttttttgttatattgggtattgatacataactttctatacatccataatttccacaggaacacaattccccgtcagcatcaacaaccatatgtccaaatgcatcttctacgttgttaatagttcgaattagaactccagatgatataatcccagttcttattcctacaccgcagttaatatatgcaatattctttttaccttttccaattccaaagttatattcacctataacagctgcattagcaccattatctatacatattattgtatcaaattctctttttagttcatcttttaattgatctgaattaaatccaccaactattcctattccaattccaacaattgatgctttttgtatttttaatttcatacaacattcttttataacattaggtataatttcagatattgtatccatatcatattcatggcttaataatttttcttctattattcttaatttcagatttgttataactattctagtgtaaattcttgaaatatcaattccaataatataaaattcactatgattaacatcatataaactaggctttcttccccctgtagattctccaatgtcactttccacaatgattttttcttcaattaatattttaagatctctatttaatgtagttaattttatcttagttatgtttgccagttcatttttagatataggaccattttcttgtataacgcgaaagatatatctgcacctatcatttaacgattcaaaacttttatatgcttccaagaaactcgctccctttctcatattagtatatcatcttttagccattatggatataagttttaatttacttcaaatataggtataattttaacccgctttatttcatttgactattaattccttgatgacaaataaatgataatttcacttctctgtgcatattaccttagcatattctaggcagcatacttacctctaaaggtgatactactctctttccaccaaatccgttttctataaatatattctgattagagtctttaataaattcacctataattctcgctccttttccttggtcaattgagcgaattatatcaagtactttttttgcttcggtttcttttacaactagtaccattcttccctcacaagccatatataatggatctaatcctaaaagattatttatagccttaacactttcactaattggaatttccttttctattaggtgtatcccaagcttgcaaagtgatgaaaattcatgcaatacagtagataatccgcctcgagttggatctctcattatttttatagaaggaaactgttccttaagttcttctataaaatgaaatagtggtgcacaatcacttttatagtctcctttgacctttaagttatatctctctactgcaattgttgttccatgctctccaatttccccagttactatgattttatctccttcttcaataggttttacttcatatccgttaattatatatccaattccgcttgtattaatgaatattccatctacacttcccttttcaactacctttgtatctcctgttactatcttagctccgcattctaaacaggtttgccccatagacttaacaatttcttcaaggctctgcattgaaaatccttcttcaattataaaactcgaacttaaataaaagggctttgctccagatacagctaaatcattaatagtaccacaaactgcaagctttcctatgtttcctccagaaaaaaacagtggctttaccacaaaagagtctgtggtgaaagccatttttccttgtactgctgtaaatgttgctgagtcttgctcttgcaagagaatattattattaaaatatttgtaaaaaagctgctcaattaatatttttgtatgctttcctccatcaccatgaataagcttaatcattttattcatttattccactcccctatacttataaaaaatagagcaagatccctccgtagataccatacaaggtcctattggatgctctggtgtacaaccttttccaaaaagctcgcatttattaggtaatttcttccccaataaaatttcactgcatgcacaagctctaatatagtttttctcagaagtcttacttaaatttattccaaatctttcagaagcatcatattttttatatttctccctcaaagtaaatccagaatctttaataactcctattcctctccattcatgttcgcaatatgtgaatacttcacttattaattcatttgctcttttgtttccttcttggcttacacaagttttatataaattttcaaatcttttttcagttttattttgttgtttcgtcaaaaaatataaagcaccagcaatatctaaagcttcaaaacctgcaattactgctggaatattatattcctctacaataaatttaaaataatctgctccctttactgctgctacatgtcctggacacattaatccatttatattgtgattaggctgcttaagtatataatggagtattggctccattcttttcattcctattaaaaatgaaatatttcttatatttttttcctgtgctatctttacagctaaagcgattataggagttgtagtttcaaatcctactccaagaaaaactatttccttatctttattttcttctgcaagtgctattgaatctaaaggtgaatataatactttaatatcttttcctttttctctttgcttaattaaattttctctacttccatttactctcatcatatccccaaaagtacttaaaatcacatttgaattcttaagtaattctatagctgcatctatataaccttctggagtaacacaaactggacatcctggtcctgacaataaatttatattaggattaaccaattgtctaaatccaagttttgaaagtgcctgagtatgagttccacaaacttccataacattaaactttttgactggagacttttgaatttcgttaagaatatttttaatcaagatttctttattcatactttttcctcgctattaagtattgatttaaatatcctttgtaattcttcaaaataatccttgtcaatcttttgaatagcacagcctgcatggactaaaacataatctcccacttttagttcttcaataagctgaatattaattctactctctaatcccataatatctattattgcactatagctatctatatctctgacttgtgctggaattgcaagacacataaacttaccttccttctttatttacacttacaaaaatcgtaaatcaatctgataacctatttttctaacatagcatcagtagattaacttagtaaatacaatatgagttcaccttccttcttggtcttatgaaaaatatacgtgacaaatttgaatatattatttcttttcaagaattgcatttgcaacatggagctggccaaaagaaattccctcatcattagttgggatttgttcattataaaacactttaaatccttgcttaatcagatttacatatattccttttaaaagataatgattttcaaaaacaccaccactaagaacaactttatctatatgctccttttctctaagcttacaaactaaatcacatgaagctttaataagtgagttgtgaaatttagacgatatcttagaaatcaattcttttttctgaatatcccccaagattccttcaataatgcttttgtattgaatattaaaaataccattttcctctttaatatcccatgaataactttctttaattttataatcaataatattttctagttctattgctgcctgtccgtcataagatatactatttctgattccgcataaggctgctactgtatcaaacaatcttccaacacttgaagatacaaaacaatttatttttgaatctaaagcttgtttaactactttaattttttcattatctactccttgaattattttttctggatcataacctaaagcatataaataacttgaagcacatctccacggttcttttatagcttgttctcctccttggagatttacatatttcaattgccctgctcttttaaatactcttcgatttccaaccaaaaattcaccaccccatactgcgccatcaagtccaaatccagttccatcgaatataattccaattacagaatcataaatagaatgttcagccatgcagctaaccatatgagcatgatgatgctgtacttctatttttctcattttcttttcctttgcatatttagtacttgagtatgctggatgcatatcgtacgccaatacatccgaattaatatcaaataaattgcaaatatgttttagtacatatttaaaattcttataacaattaaattctcctaaatcacctaaatactgactcaaatatgcgtatccatttttagaaacacaaatagtacttttctgctgtcctccaaccgctataatttcatttttaactcctgcttttaatgaataaggtctatatcctcttgaaccacgaataaccttttctacttgacctatgacttttacaacagaatcatcaacctggacgtaaatcgccctgtcattcatcagaaaataatctgccactgtatttaaatgttttagtgcttcttcatttttatattccattggcatactgcttatatttccactagtcataactaaaagatctaacttttcattaaataatagataatgaaggggagtatacggaagcattactcctaaactattttgctttggtgctatagcctctggtaatacaaaaggatatttcttctttaaaattacaatgggtctcttattactgcttattacttcctcttctttatctgatatatagcaaatctctttgataacaccaatatctttagccatcaaagctaatggtttatctttcctttgctttctacttctaagcaagttaatagcttgctcatttcttccatcacaaaccagatgaaagcctccaatccccttaatcgccaatatttttccttcctcaataagtgaaatagtttctttaataggatcttcacacttaacctgatctccacgattatttgttaaaaagagcttcggcccacatttttcacagcaatttggctgcgcatgaaatctcctactgagtggattttcatattcgtctttacattcctcgcacatataaaattctttcatagtagtattctgtctgtcatatggcaaagccttgataattgaatacctaggtccacactgagtgcaatttgtgaaagcatatttataacgaaggtttcctttacttcgaatatcttctaaacattcatcacaaactgctatatcaggtgaaacaaatctcatttcattcttttgttcagcactttctttaataacaaattttttatcaatattttctttaattatgaattcattttcatctaaacatgaaatagtacttagatcttttttaattaaagtacactcaactctttctatttttgcaatactcggaggtctttttataacattaaacataaaccgttttatgttttccctctcacctaaacagtcaattactacggcaccacctatattttgaacagatccacgaattttaaagtcccttgccttttcatatacaaatggacggaatcctaccccttgaacaattccgtaaatttttattatatatctcatatattaaagaccttcttttatttatatgttatgagctatctaattaacgatttagctttgttcgccttgaatgcttttaagaattgcagtttggtcctgtatatcttccctctcaacattaatttttgtccattttccaactaactttgaattaaaattctgaagatgttcataaagattctcctcattaacatgacttctgtgatttacaataacagtgaatgttttaactttattaatattattagtttcacatatattctttaattcttctgaaatcttacttaataaaatagtatcatgcatatttttcactatcccttcatttattttttgactgtaaattaagtatatttatttctatttcatccaaaatttttttagaaattccttccaatttatcttgtaattcttcgctcaatcccaagccaattccaacatcattaacttcaattccataaatttgccctttagcaccaggataaaaaagttttaataaatccaagaaattataactatgctgggaatatccctttttcttagaaacaaaatcatctaactgaaaacaagtgatttcacctggactctttccataatatgcagcatctaaaataaatatatagtcatcttcttttacactggcaatactgtattgaacatcggtttctccataaataactttaatattcttttctaaaagcttcttttctatcttttttgctacttcaattcctataccatcatccctcattaaaacatttccaatcgcaatcactttaatattagagtttaccataatatatatttctccactttctatagataaacgaatttcgatccaaatttgtattttaaaatgtattccacactagaaagaatgaatactcttttgtgtagtgttgcatctgagaatatcgctgtaggtatttctttagcataagttgttccactgttgcttgtcatgagcttccctcaggagcatgcaacagtgggtgcaacttctgctattagaaatccacagctgtattctccagtaaccgaaacaacagagtattcattcttccggcgagttatcacataagtatgatttttaacttgtttatctatgcatatatttttacaccaaaacctctactatttctgtatcacctgctgatccaatcaaatgagttgcacaagatacacatggatcaaatgatcttacaatacgaccgatttctataggctctctaatattgtttaatttagttccaatcaaggctccttctatagttccaggaagatttgactcatccttaggtgataaattccatacggttggtgttatgatattataatgattaataacatttttatctatttcaatccaatgaccaagagcacctctagtagtatcagttaaacctgcaccataagctttttctggaatattataagctttttgattattaggtcttagttctactctttcaataagcttactcattattcctataatcttttctgtttccaatacccttgctatatttctatccatgcatgaatgtccatttgtgtattgtccactcactattaaccttgctaaaggaccaacttccataggaagtcctaaataacgtggagcttttataaaagtgtacgcatctaatttagataaatctacttcttccaacccttcgtcctttttataccacgaataatgaatttgctctgtgattttatctagttccaaaggatattttacattatccttcattactcctggcttaacataagtaatctcaggatcttcatatttatcaaatactccataagtcataaaatatggataagattgtccctttttaaaatagtcagagtaatatttagaaattatctctacatcttctttcattatgttttttacaaaagactctatttttctaataatactttttactttttctagcttatatgcatctatattcaccgtgactccacctacaaaaatcccgtggttatggggagcttttcctcctagaagtgctaatccttcatgagctaatctactgagttcaatacttttcacataatcctgttctatctttttgtttattttatctggtagtctataatcagtatattgttgttcttctattaattttatgtttgatatttttacataacttggcatagacaaaaggtaaaaatgtctcagatgattttgtataaattcaaagccatgtaaaatgtctcgaatataattatcatttaaactaactgttacttttaatgcatcttctaacgctaaagtagaagccattgaatgagctgtagagcatattccacaaattctctctgtaaaatatacagcatctaagggtgatcttcctattaacattttttcaaatcccctaaagagtagtccacttgcatatgctttagcaattgtatttccttctacttctgcttttatttccaaaaagccactgattcttgttactggatctatagttattgttttgcccataactcctcctaatactttacgaaaggttccattccatctgggaattgtgcatttgcacacccaatacaatttgtattatctccaataggccagttaacgtatccattccattttcttcttgggcaatcagtttttgtgacaggccctctacatcctagtttgatcatgcaaccttcatctccaaacttttgtgcaaatataccttgatcaaaaaatcctctccttgtacaattatcatgaatcgtaactccatagaaaagtaatggtcttccctcactatctaatgcaggttccccataaccaatcaaatgtgctaaagttcctactacccaatctggatggcaagggcaacctggcagtttaataacttggcgatttaaaacttcctgtacacttttactttccgaagggtttggttttgcagccgatattcccccatgagaggcgcaagttcctactgctacaacatacttcgcttttccgccagctaattgtattgcatctaacgctgtgatatttgtcccattataatttgctacaatgttataacgtcccttttcttttgttgaaactgccccatccactaataatataaactctgtatctagcgtttctaaaaacttttcaaaagcaagctgcccttctaatcccataagtgtgttgttataagtaaaattcaccatgtcagttaaaatatcataaagcccaggattttcactattaagtaaggaaattatatttcctgaacatcctgtcacttcaagccatatagcattcatctttttagcctttttatcttttagcattcctacaacatcgtttgcaattctctttgacgtatgaatcttagcttttgtaagtggacatacttttccactagtcaatttaattcctccataatttattacttctttcctcttatttaaaaattagaacttttcattttctatagcaattatcattaatataagctaaattatgtactggttttagattgcaaatgcgttcaatcatttctacagctaaagtatatgattataataatttaaaaatgctacactctattcccaatccttaactttataagatttaattcctttcgatagtattattatttaaataaatcacttcggaatttctcctataagaatcagaaaaacatcacacatattttttaattataatcaatgttttgacaaaattttgttatttattgtggttatttttacattttaatgaaaattatattattatattttatttttatccaattttattgtataatatatccgtaggaatatattatgtaaatatgagaggagtttttattatggtagaaaaaatgttttgttatcaatgtgaacaaactgctgggggtaagggatgtactaaaataggtgtgtgtggtaaaacgcctgaaattgcagcaatgcaagatttattaatttatcaattaaaaggaataagtgtgtatgcaaaagaacttttaaacagaaatgaaaaggttgacacatcagtagcctcttttgttgaagattctttatttatgacattaactaatgttaattttgaccctaaatctcatcttaaccaacttaaaaaatctcaagaaattaaagagtctttaagagaaaaggttaaatctgaaaatatcacctctcctgaagcattgtacaacctaagtgattctaaagaatctatacttgaagatgctgaaaaagctggaataatgtacgatgaaaacttagatccagatattcgttctcttagagaaactataaaatatggtttaaaaggaatcgctgcttattcacatcaagctagatttattaaatatactagcgatgaagtaaatgacttctattttaaggctttagcagctttagctgatgatagcttaaatcttgaagatttgattaaacttgcaatggaaacaggtactatgagtgttaatattatggaagttttagatactgctaataatactacttatagttctccatcacctacaaaagttaatgtaaatatcaaaaaaggtccattcatagtagtttctggacatgatttaagagatctagaaatgttacttgagcaaactgagggtaaaggaataaatatttatactcatggagaaatgttaccttcacatggatatcctgaattaaacaaatatcctcatttagtaggtaatttcggaagtgcatggcaaaatcaacaaaaagaatttgataatatacctggttgtattttaatgacaacaaactgcttaatgagaccaaaagattcttatatagatagaatattctcaacaagtgttgttggatttgatggtattaaacatattgaaaaagatgaaaatggatataaggatttctctgaaataataaataaagctcttgaacttggtggtttcacagaagacgaagaagtcaaagaaatcttagtaggctttgggcataaggcaacgttaagtcatgctgaaacaattattaatgcagttaaagacggaaaagttaagcacttcttcttaattggtggatgtgatggtgcaaagcctggaagaaattattatacagagtttgctgaaaaaattccaaaggactgtattattcttactttagcgtgtggaaaatatcgtttcaacaaattacaatttggtgaagttgcaggacttccaagattgcttgatgttggacaatgtaatgatgcatactcagcagttagaatagctttagctttagctgatgcatttaactgtacagttaatgatttacctttatcaatagtgttgtcttggtatgaacaaaaagctgtatgtgatttactagcattactttcattaggcgtaaaaggaatgtatattgggccaagcttacctgctttcttaactcctaatgtattaaatttcttagttgataatttcgatcttaaaccaatccgtactcctgatgaggatttaaaacaaatattaggctaaactttgaagttggacaataaattgttctattgtaaaatgcataaaaccactgtataaaattaaaagccatgcaataagtgagataaatctccttattgcatggtttttgttattcctattttgctattaattttccaaaatctctgcatttgtcttcatcttcaccttcaggagattcctgcacggttaaaccttcgcttattaatatagcaccatatgactccattctcttttcccattctgtcatccattcaccattgccccatccccatgaaccaaaaagagcaactttctttccttgcaaacttccttctaatgatttaacaaaaggttccatttcactttcatctaattcttctgatccataagctgagcatcctaaaataagtatttcttcattattaacatcatcaagtgttgcatttgatacttcaactaattcggctttcttcccctctgattctattccttctagaattaagtttgccattttttctgtatttcctgtttgactaaaatatacaattttcatataacttcctccaatcacttttctcctaaaaatttattttttatctatttcttgatataagtataactttattaatttaaataaaatgtgattgaaatcaaatcaagaaaaaatctgatatacgcaagtttgatatctatataaaaataaatattcattattacattaataagcaataatgaatatttattttatatatagttcttcaagccttcttcatctataatgattattgtttttgttcctattatttttattagattttcatcttctaatttctttaatttcctgcttatggtctccctcgtcaccccaatataactcgccatatcttcccttgatatgggtagttttacagaaatattaccttcaacattttctccatacttctccataagctctataattaaataagccattcttgagtcaacatcgttagttgctaaattctgaacaagattttcaacttttgataatctctctcctactgtttctaatacctttattccaatctcaggattcttcatcattatatctttcatttcctccttagtaagagtacatattttagcatcctctatagctttagaattaaatccatatttagatggttttataagttctaattccccaaagaaatctccttctgaaagtatatgtagtatctgttccttaccatccttagtatatttatataattttatttttccttcatttataaaataaagtgtattagctatattaccttcagtaaaaataacatcgcctttattaaattctttatgattaattttatttacaatctccactaattcgtctctatttaaattctcaaatattggaaccttactagcacaaagtcctcctctgcaattattgcagcaattaccacagtgaatattcataacaaatcctcctatctataagatatatctacaaatactatcttactttaagttgtgtcccgtgtatatttaattctaactaaaaccactcaagtaatattctccttagtatcattataataaaaaactcatgaaaacttaatcttaatattttgatttgaatcatatttttataattgatatggatataaaataaaatcatcgaaagacaacaacttagaaaactaattgaaatataaaaataaatacaaattatggaggttttatattatggaacaaaacattatgctaggtaaaaatatattttgggttggtaaggtagatgatagagatgtgccttttcatagattgactttaactaaaggaactacttataacagttatttattaatgacagaaaagcctacagtaattgatactgttgatatgagttttggaagagactttgtacaaaacttaggtaataagattgaacttgataaaattaaatatattgtaattaatcatacagaacctgatcattctggtgcccttggaagcttagcagccaaagcaaaaaatgctgtaattgtatgcacagagccggctgtaaatgaacttaaagagatgtacaggcttcataatagagaatttttagttgtaagtgatggtgatactttagatataggaggcaaaattcttaaatttatacaaacaccatatcttcatactgaagaaactatgataacttattgcgaagataataaaattttatttccttgtgatattttcagtactcatgtagccaattatgaatacttcaatgacttagctcaagtagacataaaggaagactttattacttattataaattgataatgcatcctcacagaagatatgttcaagaaatgattgaaaaaatcaaagatttagatataaagatgatagctccttctcacggatttattattagagatgaagtccaaagctttatagatatttatgataatatgagcaaaaatacagagctagataaaaaagcacttattctatactctactatgacaggtaatacaaaaaagattgcaggcatttttaaagaaaagtttgaagagcaaaatataacttcaaatattattgatgtaaataaagatgcaatggataatataatgaatgctattaatgaagctgacgcaatcttctttggcagctcaactaaatatggtgacatgattggaaatatggaagaggtactaaagaatcttaaaactctaaatttagaaaacaagctaggcgcagcatttggttcttatggctggagtggagaggctatagaggttatacaagactatttaaataaaaataatttaagatcattaaatacttctgatataattaaatctactggtatgactgatatagaattacctctaagaattagattttcatcaaaagaagacaacctaaagagcattgatagaatagttacctatactagtgatttattgtttagtgcaatttaaaataaggcgcatgaaaagaaataaagtgcccaaagttgccgtagatatttttcatctataatctacatcaaaaggatcttgtgagattaggcacaaaacagcctttctttcctaagatccttttgatattaaatataacatttatttgcttagtatatgtgtctcacccactatttaatcaaactattattaatatttaaaattcttctaacactttctgaccaaaattctttccaaaggctatgcactcttcaagttcgtcatcatttggcatatatttaaactttaatccatcttcaacaactttaattttagcctttgttaaatagtttgtaagaatatctgttgattctccaccccatccatagcttccaaaagctgcacctactttctcattaaacttcaatccaattaggtcttcaataagaggtaataaagacgttaaaattccactattaactgttgatgatcctagtattattccctttgatttaaaaacttcagctaatatatcacttttatctgaagtagcgacattaaatattttatattctacccctgcttctcctaggcctttgcctataaattcagccattttatgagtagcaccccacattgaattatatgcaaccactacacttttatttgattttccagctgaccactcataatatttctccactatcatcattggatcttttctccaaatgatgccatgagctggagctatcatatctacaggtactccaagttttttaagttcgtctattttttttgtaaccagtttactaaaaggagtaagtatgtttgcgtaatatttaagagcttcctgattaacttctgtttcatctacttcatcattaaaaatgctcgaagatgcataatgctgtccaaatgcgtcattagaaaacaatatattttctccagtaagatatgtaaacatgctatcaggccagtgaagcataggagcttctataaatacaagattatttttacctatatttatcttctcccctgtggaaacgaccttaaaattccactccttatgataatgcttctgtattgactctaaaccttttttcgaaacaaaaactgttgcattaggaatatgctccattaatgcaggtaacgctcctgaatgatcaggttccccatggttcataacaacataatcaatctttgatatatcagttacctctctcaaattttcaagaaacatctctgttaaaggctcccatacagtatctataagaaccgttttttcatctttaataaggtatgaattataagtacttcctctatgggtagataattcatttccatgaatatgccttactttccaatcggtggcgccaacccaatatactccatctctaagttccttcatgctaattcctcccatttgttaaattctacttcataagttctataaaatgtataattcaactcttaatatacgtaattttctgatagattatacttagaacttgcagtactaaaatttaaaaatatagtattataatgatgctcaccctgtgtgtataaattcaacaaaattcaggtggagttaccctcccacctgaaaagtttcactttattctaaagagaacaaaaggcaactaaatttctagttgccttttttgttgctaataatctcaataaattcgtctattgaatatttagctgcttcattaatattaacttctattttattttctataagacttttaatcaccatgaatttcttattgtcacctaatacgatagttccaactatatgattattacgtataagtattttataatacttatgttcattatccgatccttcaaccaataaatctatatcttgatctccttcaatatatcccattgaaaacacagatattccaaaagcgcttaatgaagttactggtgctgaatgttcaaaaattaaatcttgattacatatattcgctcctgcaactttaccttgctgcattgccatactccataatccataggctctaccgttaaattccgaaacatctcctgcggcaaatatatctttcatattagtctgcattttgttatttactactatccccttattcacctctaaatcagtattttgggcaattgaaacattgggcataattccagtggaataaataaccatgtcacaagcaccttgcgctccagacttagttataaaccctttgaccttttcttccccaaatatttcttgtacttgagtatccagcattacttcaatattttgagcttcaattgatttctttaatttatctgacgcaaattcatctaactgacgaggcattaaacgtgaagcaaattctgcaataataacttttttcccacattcagataatatattagcaatttctaagttctgaactccccctccaataagaagtactctcttaacattatttaaatactctaaaatttttaaagctccatctaatgttcttaagttaaatacacctggcttatctatgcctttaattgggggcgtaagattacttgctccatttgctaaaagcagtttagtataaggcacacgggttccatcttcaagaattgcttctttattttttgtatctacgcctgtaaccttattatcagaataaacctgaatattattatccgtataccatttctttttttgaattaagagcttatcttcctcaaaattgcctaaaagccctttagaaatcttaattcgatagtatggataaaacttttcctcaccaaatataacaatttcactttgcttatctatttctcgtattgctttagctgctgaaatggctgcaataccactaccaataataactatcttttcttccaagaaaaacacctcttttttgttcataaaaaatatatgaatgtcctaattaggttccttttattatacctattatagctttatttattcaaataaaatgtgattagaatcaaataagattttaaatatctaaaaataagtttgctaattgtatcctttcattagtttcccactgaatatatctccgtaaacaaaaaaattatatacataattaattcctaaataggaaaagttaatatcgatattaatagacgcatgaaagaaaataatatgcttgtatttctattaattttctttcatataggaaagttgaaggagtgaaattttagtgagtgaaaaaatgctagaagaattagaaggatttaacggaagagtaagttatcatgattctgtagaagaaatggtaaaaagaataagagctgataaattatcaaatgtatttgatagatatgcttctcaagaaaagataagatgttcgttttgtcttaaaggggtaagctgtcaactctgttcaaatggtccatgtagaattaatgaaaaaggtggccaagaaaaaggtgtctgcggaatagaccctaatgctatggctatgagaaactttctcctaaaaaatataatgggggctggtacatatagtcatcatgcttatgaagcttttagaacattaaaagctactggtgaaggaaaaactccatttaaaattactgatgtagataaattaaaatggatgtgtgaaaaagttggaatcgatacaaatcaagaagttaacaaaatggcaatcgacttagcagtattgcttgaagatcagcaaaagatagattcagaagataaaaatgttatggtagaagcttttgcccctaagaaaagaaaggaaatatggagaaaattagctatatacccagcaggtacagtacacgaagaacaaaactgtgtagccagctgtcttacaaacgtagatggaagtcatgtctcacttgcaatgaaagctcttagacttggaatcgctacaatttacaatactcaaatagggcttgaaatggttcaagatatactatttggaactcctactccacatgaagttaacatggatttgggaattatggacccagattatgtaaatgttgtatttaacggtcaccaaccttggcctggagttgcaacaatattaaaagcaagaacaaaagaagttcaagatatggcaaaagctgcaggtgcaaaaggtcttagaatagttggttctatagaaacaggtcaagaattacttcaaagatttgaaatggatgaagtttttgtaggtcacatgggtaattggcttactatagagccattacttgctactggtactgttgacgtgtttgcaatggaagaaaattgttcacctccagccatagatatgtacgcagaaaaataccaagttactttagtatctgtaagtactataattgatttacctggtattgaacataagattccttatgaaccttcagaagttgataaaatggcggataaattaattgaacttgctattgaaaactttaaaaagagaaaagaaagaaaaattgaaccattagttccaaagaaaactcaaaaagctatagctggtttttcaactgaagctgttttaggtgctcttggaaacaaacttgacccattagtagatgtaatagctgctggaaaaattaaaggagttgtagctcttgcaaattgctcaactctaagaaacggtcctcaagattctatgactataaaccttacaaaagaacttataaaacgcgatatattagtagttagtggcggatgcggaaaccatgctcttgaagtagctggactatgtactgtggaagctgcaaatgaaatggctggagaaggtttaaaagaagtgtgtaacttgctaaaaatacctccagtattaagctttggtacttgtacagatactggaagaatttcaatgttagttactgctcttgcagatcacttagatgttgatgtagccgatcttccaatagctgttactgctccagaatggatggaacaaaaggcaactatagatggaatttttgcactagcttatggtacttatactcatttatctcctaccccttttatgaccggtgctcctcaattagttgaacttttgactgaaaaagcaaaagatgtaactggtggtaaaatagctttaggtgataatcctgttgaagtagctgaaaatattgaagctcatattatttcaaaaagaaaaggtatgggattaagctaatatattttataaacaaattccattaatattaaattaacatgggtgtctcaagataatttctaattgttttgaggtactcgtttttctacgcactatgagtcgattttattgcgtaatactcatttttttaattacactaaacataatacataaaaagaagaggctatatcaaatttattatgatataacctctagtattattaacaattagagtttcttggaataacacgtacacttactgatagtgaatcagcaattgtactatcaggtgctatctgaacaaatactaatttttgagaagctttctctgaataaagtgctttaaatttaaatacagctgttccaggactaccaattgcattactatctggtatccattcctgacttaaaaactctatattattaggaatatcataaacaagttcccaatgatatcctgtggatccttcacttactgaacggattctaacacaaaaagtttcgcctgcctcaacagttattcttcttggagacactaatgaatttgccataatacattcacactcctgattaatattaattttattctaatattcttttagctttaatatttcattactagagagcaaatctttataatataaaatatgtctagtagtataataatgttcatatatttttattttttagcttattatattaaatttacgtttttgtataacttataaagtaagaataaaatttcagaagttactaaatgatataaaaaatactatgaaattcctttcttaactataagattctaattgcattttcatttcttctaattgcctatctacaatacttgcctcttctatgtgatttgttatagtttttgatgtcactcttaaaatttcatccacatttattatttctttactcatattttcgatatgtcgtttttgatttgttaaaatttctattactttccttacttcctgctcaacttttcctataaaagataagctttcttctatcttttctgccgcattcactgatgcattaacccctttagcaataacttctttagatttatctgaattatttataacgatatttgtttcatcttctatattaccaattaacactgaaatatccttagtgctttgcttagtcatttctgctagatttcttatttcacccgcaactatcgcaaatcctttcccttgttctccagcccttgctgcttctattgcagcatttaaagccagtaaattagtttgattggctatattcgttattaactttacaacctcattgactttactaaaccgtcttgccaattcatttatattttcagtattattcctattctcatcttctagaaatcttactactttgacaatttcctcaatagcacttttaccttcatatgatttattaaccgtatcttttgtaatttcgataagattattcccttcaagatataatttatctgtcaagtcattagtattttctgtcaaactagaaatcgcattcatatgtacctttactttatcagcaagctttcctaaaacgtcatgttgatcatctactctatgatgttgttttacaatccccgctaataatccactcattttctgaagaaaattactagtatcatcgtgcaatttttttgcctttattatagtttcttcaccgtcaattgattgcttattttctaaatctttaattttcttatttctaaatagattcattcagctcactcctaaattctttcaaatatataaatttttcttaaattatatattgtattatttttatatcctgcttcttcgttcatgccattagctagatagaaacttatagtaacaatcgtcaaatctgtttcttaatacaattttaagctaaaatattcaaaaagaatgtgatttaaatcatatttcgctaaattttctgtaattgtaaatctataggttgtaagatattgtaatttagttgttgtaagttttgttgcaactgtttcagcttataattcagaaaagtcatctcttgaagctagcactgttcttgttcaattatatgttaatcttaatgttgctatagatattcaaagttataaaacagtctctctagttaatagttaagtgatttatatcacggcactattatcatttatgttataaagttatataaaacaaagtttttaggaggaatatagaaatggaaaaaataaatgttaactatgaaaaaatgtattacggatttcctgtaattcttataagtttctttgataaaaatgggcttccaaatgtaactactctttcatcttcctatagccttaaggatatggtagttcttggctttagtagcaaaggatatgcaattaatcaaattaaagaagttcgtgattttgtaattaatatccctgacagttcacttaggaaagaaattagcttttgcggaactaaatctggtcatgaagttcaaaagtttgacgctaccaaattaacttattctaaatctaaaattgtaaacgcaccaatcattgaagaatgtccaattactatggaatgtactttaactgatgttatcgaaaaagatgcctatgcaggtattactaatattcttggaattataaagggcaggcttatttcaaaggaatatttagatgatgaaaacagattaaatatttcaaaatttgataaccttttatattttggggatgggataaacaaaggatatagatatattaaaaatgagcaataagataaggagggagctatatgtcttacgaagctatttgggctaaaaatcaaagactaaatgacgtagaaattataaaacttgaaaaggatggcttagatgtaattgaaactataattgacaaatactctaaggaaggttatgattcaataacgcctaaagatatgaatagatttaaatgggctggcgtttacgaacaaaagccaagagagggatactttatgatgagagttcgtattaattctggaataatgacttcagagcaagcaaaagttttagcagggattgctaaagattatggacgtggaattgcaaacgcctctacaagaggagctatacagtttcactgggttcaggtagaagatttaccttctatttatgaaagattagaagcttgtggcctaagtccttttgaggcttgtggcgattgccctagaacgatagttggaaatcctcttgctggaattgataaagatgaacttatggatacaactgaacttgtagaacaagttaataatttcttcttattaaacaaggatttttctaatttaccaagaaaatttaaaatatcaatatcagctagtatacataatgcagctcatgcacaaattaatgatcttgcctttactccagcaacaaaaaaaattgataatcaggacgtaattggtttccacgtatgggttggaggaggactttcagcaagccctcatttagcacaaaaactagatatatttgttaaaccagaatatgtactaaaggttgctgaaggtgtatgtactatttttagagattatggatatagggaaaaacgtactcgtgcccgcttaaaatttttagtagctgactggggagcagaaaaatttaagaataaattattagaatttactggggatatgccaagctcaggtgatgataaattagcttcatggaatgcatcttattattttggagtacattcccaaaatgaagatggcaaaagctatattggtgttagtttaccacttggagaaatcacttgtgatcaacttttagaacttgcccatatttcagaaaaatacggagatagaaaaattagaactacactatcacaaaatttaattattacaggcataagtgatgaagatataccttctctattaaaaaaagatgtatttaaacaactttctccaaatccaagtatttttacaggatacacaatttcttgtacaggtaaagaattctgtaatttagccattgttgaaacaaagaaacgtgctaaagaagttatcgaatatcttgattctaaaatcaaactagatacaccgttacgtatccattttacaggttgtcctaattcttgtggacaaaaacatatagctgatatcagcctccaaggtgcattaataaaaaccgaagatagctgtgaggaagcatttaccatatggcttggtggtacactaaacaatggtgggcagtttgcagaaaatctaaactaccgtgtaaaatctactgaggttcatatagttcttgagaaaataataactttctttgaaaaaagtaagttagagaatgagacttttaatgaatttatcgcaagagtaggaattagtaaaatcacagaaaacatataaaaacctaattaaaacagaaccagtgagatatgtttatgtcccactggtttaactttttattcttacttttttccaacagctgcaagatatataataaattcttcatctccatctaacctcaaaagagtgtctatcatcttttgatcataaattcctatagcacatgcacctgctttgattgattcactggctaaataaagattttggcatacatgaccaacatctattaaaatctttttatgtgccgtaatatcaaacttccattctgaacgatatggagtcgtgctccaagcaaataaaacagcagctttctttgcaaagttaggtacaaaaggctggtctaaagtaatttcatctattttattgtcaatttcatctaattcaaacatgaataaaagtttatgctctactggtagatatctataaatacctttttgtatcccatcaacattcataataaataaatatgtttcaaaagaatgcgttgccccactacagggaactgttcttaaagttagacctgctttattagtttcagtaattccttgagtagcccataatagatatgacaattcttcaagattcatagacttttcagcataaagccttgtacttcttctattacccatacacttataaatattagaattcgttacagtttcttcacttacctttggtaaaacaacaattttagattgtgaatcataagattttatgctagctggttggggtatgcctttcattttatcagtttttatatttttgaattcatcaaaattagatttcaaaaaatttctctgcttttcatatcttgtcataaaaattctcctatcctatcttttggaaaatataatatcacaatactgaaaaatagtatgtatcatcagttacgtttattgttcgataagatgcaattatttctatattgtaattttatttatcaaatcactttgcaaaaactagcacttcgaataaatctcacttccatatttgacctattttattttaagtttttatatcaaaaaagcacctacatttctgtaagtgttatatattaaatattaacttgtcccattaccttgagacaaactttactaattattaattttcatctatgtattttgcactgtatcctgccttacttattgcacctttgagtatttcttcacttatatctactttcattctaacatttgctaagttcttctttaaatcaacctttgcatatacattctccaaactgttaatagcattttcaacatgagtagcacactttccacatgtcataccttcaatatatatagtctttgatatctgatactctgataactcccttttgtttatcttctttctctttgtatttttttctatagttcccccacagcatccaaatcttaatttctctataaagctcctaactgaaaaaactataatcaaaagtattatcccacttaatatatatgttgccataaaaacaccttcttttaattaatgttaatttatttattttaagtatatcactgcaaattgcatttgacaatgattatcattaccttatattgaacaacaaaaacatattatctttctagaaaatattatttactttaatatgaataagatatcttcaaaactcaaaagcttcattaaaaaatcctatattttgcatattatctattacttaaatagtattaataccttactaaacagctcaagaatttaattctttctaattttgaaagtttttcataaaaatgacttgcaatatatatcttttagatatatattttatatatctaaaagatatattggaggaaataaaaaaatgaatgaactttttattttaggtgaattaatggaagaaccacaaagtggttatgatcttcgtaatgccttacaagcttctttaggacgtcatcgtaaagtcagctatggagtaatttatccattgcttgaaaaattagagaatgatggttttttagaaataactaacgtagaatcacacggaaaaaataagaaaatggctacaattacggaaaaaggaaaagaacgtttttttgagctaatgaaaatgcctattccaagtggagcccatactgctgatatctatttaataaaacttgacgtaatgcagcaccttacaatagaggaacaaatgcaactattggatcaattcgatcaagaacaaagagatataattgaagatacacaatttgcactaaaaaaattagctgaggaagattcaaaagatcactggtatgcaagtaaaaggtttgaattacgactacagcaggcaaatgttgcaattgattggattaaagaatttaaacatgaactgaagaaagaatggtgataaaaatgacaaaagaaataaaagtagctttattaatggctgctagtctctttatggagattttagatggaacaatagtaacaactgcactacctaaaatggcccaatattttcatacgggttcatcaacaattgctttactcgttagtgtgtatttgatcacagttgcgatttttattcccctaagtggatggatggctaatcaatttgggaaaaagaaaatttggattattgctgttatcctctttaccattagctctttaagcagtgcactagctcctaatttctctttccttttgataatgagaattatacaaggtatttctggtgcattgatgacacctaccgcaagactgattgtgttagaaaaaacaccagcttcacagctattaaaaatgattagttacttaatttggcctgcactcatcgcaccagcaatagcacctttagttggtggatttattgttacctactggaactggcaatggatttttttaattaatgtaccaataggtttaattacagcattaataggagcaaaattaattgatactgataaagtaaaaaataaaacttcatttgatcttataggatttatagaaattgcactttcatctggcataattttagttggaacagaaatagccactcacggaaaagattattggcttagcgcgctaggattagtaattttaggaataatacttggatttatagttttcaggcacttaaaaaaatcagatgatccactattttcacttgattcactaaaaataacttcttttagaatattccaaacaagtggatctgttctatggctatgtgttggagcattaccgtacatattaacaatttttttacaaacggtctttcaatggtcagcagtaaaagccggaagttacgtgttatttatttttgttggaaacattggaattaaaccttttacaaatataattattcgtaaattaggatatcgcggtgcactattatcatcatttggaatggtgtttattacatcaattgctttagcattcattcaaattaatacttttcctgcttggataatgtttcttgcgctagtttcaggtgtaggacgttcattagccttaactgcctacaatggactaagcttttctgaaatagcccctcaagatcggaatagcgcaaatactttgaatgctgtagtttcaacattagcacaaggaatgggtatatcaattattacagttgttgttaatttactacaaattttcttttcaattactatctcttataaattaagctttgttttccttggtctattgatgttatatccagtaattgaagtaatatttttacctaaaaacattggacatgctacaatcagctagttttatttatagtcttccattcaaaaaaactcaaactttaattaagattgctatcataaaataggcttttgcaatgtatgtttttcaaaaattgtgtcaataattaaaatacgatttcctattttcaataaataaagagatagcattattatcattaacctgatatgtctgctatctctttcaattttactaaaagaactaattaaattaatttacatatatctttatttggaaagttcattttgaaaatcacaggaagcaactaccttgtatcctgatgatcttagattttccagcaagattattactcctgtaatatactgttcttcctttataccttctccaggctcaataccaagataatattttgagtatagaaaaccgtcttcttctttaacacttttttcttcactaaaatcttcattgtttatcaattctattttcattaaatctgagatgattgtccatctttttttactacccattgttattttttcaattaaattcaatataacttctttttcttcatcagtgttgatgaaaattttacagtacgaacttctatatttactcatattatcactctctcataacaaaatattatctaatatgtactcaatacaagtatatattaatagatagaatacgtaaatattttgaaataaggctctaattatccatttgagtacgttataattaatataactattttattctataagcaacccatctagaaaaccttcctataacttcaaatgaaactatattgcataccaactcagttagtcttccaaacttcctataaagcaaattaaaagctaaaaatggaatccattgttttttagatttaggaagtctcttaattatattcttaagcgtatacacttctttatatatccatagatagccgtcatataattcttctgctgtcatattctttggtttgtatacaacatgggaagtattataattagataaattatgatctactattctattttcctttaataatgatgcgtataactttgtgcctggataaggagtcattatatgagaagttactgtctctattttatttttaactatccactctaatgtactcttaaatatttctgcatcatcttcatctaatccaaaaacaaagcttgcatttatcattatccctcttttatgaatttcatcaacaagcttctcatatctgcttacactattttgaattttatgtacactctctattgacttactatttatactttcaaatcctataaaaagactttgacatcctgattctttcatctcatccaatagttcaggcatgtccactatattagacgtaactgctgcattccatttcaactttagaggttttatttcttttaataattccttagtccatttaggatttccaataaaattatcatcaataaacataatatgttttgtttttagtactttaatgtctttaattacatcttctataggcctattaatataagttttaatggaattagtgcagctattatagcaaaaatcacatttaaaaggacaccccctgcttgtactaattatattagtatataaatatttcttattatctatcatgctataatcaggagatactatttcatttccattaatattttccatatcataatatatttttttaattgaatcattttctacatccttaagaactttcttccaaactctctcagccattcctataattattgcatcaaatctgtttacagctccttctgaatctgctgtaatatgtatacctcctgcaattacttttaccccacgattttggaattcctttgatatttctactgccctattcataacatctacagtaacagttattgcaactaaatcaacattttcatcaaaatctatcttatcgacattttcattctcaataataacctcatgttctttaggtgtaagatttgctattgtgagtagagctaatgaaggagacattcttgtctttaattttgtatccataggccttggtagcatcgcaggttgaattaacttaatcttcatagtatttccccttaaattattatattgaaattattaatttcaaagtattatgcttattggctaaaattatcagatttaatatattgcacataaactattattagaataaaatatgtaatcttgcttatactctatcgaactctgctaaaaaaagaatctacaaattgtaaataatctttcttttacaagatgaaaacctagttatatttatcttatttttaagtatctgcatcatttctatattccaatatatcgcctggctgacaatctaaggctttgcatattgcctctaaagttgaaaatctaatagcttttgccttgccatttttgagtatagaaagattagccattgttattccaactttctcagtaagctcggtcacactcattttccttttagctagcataacatcaatattaattataatcgccatattattttcctcctgtattcttcattctgtacattaagattattaatctttacgccttacactgttaaatcattttctgattttatgtctatggcttcttttaagagcctttgaagaacagcagagaaaactgcgattaccaatgaagcaaagataggtatcattccaattattattaaacctggggcatcgtctttctctgctaccaagtaaacaaacggtagtactaccacgtataatgcagatattataactgcacagtattttatattctttaacgcctttacagataactcagaaaacgctacatttttatcaatataccctaaaagttttaaggccagatataatgcagcaaagaacggcacaactgatacaagcatacctgctaaaattggatatatcatttttgcatagtctggatttattggattattagtcaatcgaattaccccaaatatacataaagcaagaaccggaactccgataagaataacagctatctttaaaaaaatcgttgaatatcgtttcataaaaagcacctcacttttaaattatatatataagatatcacattatttatcgtttatcaataaatttttattaagtttcgttatctaataaacaaaaaaaagtgctatatctcatgatatttagcactttttctataatatcttattatctatatataaattatttctactcctgaaaaactaacatctccaactaacgttaatgtatttgtcgatctctcattgtttctatttttttcatcaacagaacctaaaaatacattagtcttattatcaaccttccaagttcttggtatatataactctactcctgaaaaagaagcattaactcttactatagcattttcgctgctcataactgcattgtcaaaatacaccttcatagctccaaatgaacagttaagatcagcttgttcaaattcatttgtatttatatatttaatacaagctccaaatgaatttctaaatataatattaccatcatcttctatgtcaattttttcgaatttataatcctcatgaacatgattatgatgaatccaattaacatgtttatgaaaaatcatggaaaggccgatgctaccaaatagcgctgctataagcacagtccaaggagtaatagctgtaattcctaattgtctagcatagattatacaaataaatgcaattggaaatagaatacctgaaaagttaagatgaggtatactttttgctatgatcactactaaaaaaactgttaatatcaaactaaatgcatttatatctgggaagtatccaagtttacttataaccataaaaatacctgctagtataaataaaattccccagaaaactctttcttttttcatcattatttcctcttttctaataatttaatttttaatggcttgtaataatatcttgaaacatacacctgtttgtgagtattttgaaattcaactctgcttgatgatgatatgctttttgttatggagtaaatatgatttgtatttagtattgttgattttgaaactctcataaaatatcctggcaataattcctcaagttcatatagcttatactttacgttatatatattattaatggtatgtgcacaaataccgctttcttcagtttcaaaaaacaaaatttcttccagtgaaagataatactctgtttctcctttgtaaaatgttatatgctttttttgtgacagcaactcaccaagcacaatttggatatttctaacctcttcatttaattcattacatttaataataacttcattttctttaacttcattatcaagttcaactcgtattttcatattttcactccccacatctttattatatttgctgacttttacgttgtaaacacgatagcagtaagtggttagttatcacttataagtggtatatttttatatactttgtgcatggtctttgatttttctaaagcttcacttattatttatctagaataatctttagaaaaaatagctcttttatacctttatttcttaattttcataaaaactattgtttagggaattctatattaagagaatttaaagagaaaggaagattataatgactccaattacactaggtgcagatgcaccagattttaaagcgaaagataataaaaaacaagatataaagttatctgattttaaagggaaaaaagtacttctttcctggcatcctctagcttggacaccagtatgtacagatcaaatgcgagcattagaaactaattttgagaaatttcaaaatctcaacactgttccacttggattcagtgtagattctcagccttgcaaagaagcatgggcaaccgttctccaaattaagaatgttagtcttccatcagatttttggcctcatggtaaaatagcttgtgactatggaatatttgatgaaactaaaggaatatcagcgcgtgccaacataatcataaatgaagatggtaaagttcaatggataaaagtttacccatcagaacaacttccagatataaatgaagttttacaggttttatctaataaccaataacatattaatggaattcttaaatgacttgcctatgatttagtaatgttgtaattgcatttatgtattattatttagcatattctttaagcatgaattataaaattgtacacacttaaaaatccaaggctgatgagccttggattttcataatacaaatatatctataaactctttaataaaaaaatcaacattatttaaaattatttatctttgtctaaattacgccagttaccatcatatgcatagctatcaagccacttataagtttttactatttcattattctttatttggtatattgaaagtccgccttgatgtggtacgcaatatacatttttacttgtcttcccaaccatgtatccacagaattctgaatcatgagagcctgtaaggctaaacacatatacatcctctactggtagattccatttatcgctggctatgaactttttaatattcccttcaagatatcttttggtcagcttagctccataagcctcattcatttttgaaatataattattatcttcttttaatattaaatttcttgcttcctcagcttctttagatggtttaatccaaattccatcttcatctaattcatatccatcaattacagtatcatgtgccatagctccatcttgataaaaataatgccaagtatcataataattatcttgcacccatcctgttttcatatatccatttgaatcaaaataatacgtctttccattaatgtctctccatcccttagcatacgaatttccttctgaataccaccagccattattatcttgtctccattcagcactcgctccagttggacttaaaactaataccgaaattaccactaaagcaccagatattaactttctcattttatttcccccatatttattcataacatgattttatgttatttattatatttataaaatattactaatcatatcttatgaatattgaatgaaatttatgagcttaagctggttattaaataattatcatcaccttgctttaatttcacatacctttatctaagattggcattattccagcatattcttaagaatatatatggtttggagtgtatattctaatattctgaagaatatttattttttgaaacacattataaaaatttttattaggaaactttcttaattttaaacattaactgacccatctatttgaactgagtttagaatttccataaattcatcacccattatggtttctttgaaaataagatgcgatgatattttacccaaagcctccatattagcctttaaaagattttttgccttttcgtaggattcattgattatattcataacctcacggtcaacttcagcagatatttcatctgaacaatttcttactggtctgccgtcaagatatctgttttgaattgattcaagtcctatcataccaaatttttctgacattccatacattgttaccatttgtcttgcaatactagtagctctttcaatatcatttgaagcacctgtagttatttcattaaacacaagatcttcagctgctcttcctgcaagcagaacaactatctgttctagcaattcatctttagacataaggtacttttcttcttctggcatctgcatagtatatccaagtgctcccattgttcttggaacaattgtaatcttatgaactggctgagtctttttctgaagcgctgaagctaatgcatgtccaacttcgtgaaatgcaacaaggcttttctcattctcagtcattactctatcctttttctctttacctgcaattacagtttcgactgcttcaaataaatcatcctgcctaaccgtatctcttcccattcttacagctcttaaagcagcttcattaaccatgtttgcaagatcagctccaacagcaccagcagtagcaagtgctatctcttttaaattaacgctttcatccattattatattcttggagtgaacctttaatatattttctcttcctttaagatctggtttatctactataactctacgatcaaaacgtccaggtcttaataacgctttatcaaggacttctggcctattagtggctgcaagaataacaactccctttgaagaatcgaagccgtccatttcagcaagtaactgatttaaggtctgttctctttcatcatttccacttatattaccttctctactcttacctattgcatcaatttcatcaataaaaataatacatggtgcttgcttttcagcttgagcaaataaatccctgactcttgaagctccaacacctacaaacatctctacaaaacctgacccagaaagtgagaaaaatggaacctttgcttctcctgctacagcttttgcaagtaatgtcttacctgtacctggaggtcctactaaaagtgcacctttaggaagcttagctcctatcttcgtatatctttcaggtttgtgaagaaaatcaactatctccttaagagattctttagcttcttcctgacctgctacgtctttaaaagatactcctgtagccttttcaacatataccttagcattgctttttccgacggacataaatcctcctccgcctcctccaattttattacttaaagacttcatgaaccaattacctaacatatagaatatagcaaaaggtataatccacgaaagtataaaaccgataattggagactgagtattttttacgggggtagtaaactttacatctgcattatatagtttatctacaagttggggataatctaagttgccagtataatataattttttatttatagctgaagcatcctcatcactttttggtgttataacaagcttgtcactataaatctcaactgattctacttgtttattattcaccattgtaagaaattcactataatcaatttgtttatgatttgactgagaaatcaaatttataactatatttattactaatgtaattataagcgctgctataatgtatttcggtaactcctttttattgggtaatccatttttattaggcgacccttttctatttttaaacattaactttcctcctttaatattaacaaattacagccttaactaaatagactgttattgtataactttaatacgcgatccatgccggataatctattattctctatcactgcttcccatgaataaaaatataaggtgaagcaaacttgcaactgcagttattgcagaagcaacataagtcatagccgctgcatttagcaccttttttgcaggtgccatttcattgaaactaagtatcccttgggattctagttctaatattgctcttttgcttgcattaaattctactggtagagttacaaaataaaatgctaccgccccagtaaaaaacactatacctagttgtgcaagcaaaggaatttgaaatattaatccaaaaatcgccatatatggtcctgccattgaacctatatttgcaattggtacaagcccgcttcttaaagaaagtggtgcatattgtactttatgttgtattgcatgtcctgtttcatgagctgcaacacctatggctgcaacagaattgctgtaatatactgattcggataatcttactaccttttttccaggatcatagtgatctgttaaactacctgctatcggaactacagctatatcataaagtccatttctatcaagaattctccttgcaacatctgcaccagtaaatcctctagcattgccataattgctatacttgtcaaaggttccttttactttaaattgacaataaagcgaaaaagccaatgccggtaaaactaaaataatgtaataaatgtccatgtttatccctccaatatatttatttcatggttttaattaaacaaaaaagacctttgatctgattcagtaacaactaaatcgtatcaaaggtcttgctttccatttggagtatagaaccaggcatttttaattgccggttgttggctctatagcttataagctactcccctaagttatatgaagtatatcataccttattatatggtgtcaatacatattaattcacaaatttctattttgttttaattttcactacattccgacattttatgaatgtaactaattatttaggcactagagaaagtgttcaatcctcaataaatagctacttagttttataacactaattaatcacaatatatattattaaattattttattgatgcctcatagatttccttaattgattttgatattgttccattaaattcttcttcagtttgctgagcagtgagcccttgagataaagctcttgaaaaactggcaattaatccatgattacgtcccagtctttcttttgcttctgcttgactataaccacctgacagagctactactctgacaacatgtggatcatctattaaatcaatgtagaaattatcttgagttggtattgaaagtttaagcatcacttttgtttctttatcaagttttgataattgctctaaaatttcaagttttaaaagtttttcagattcttccttatcggtgctatggatgtcaacttctggctcaataataggaacaagacctgcttctacaatctgtttaccaatttcaaattgctgattaactaacattttaattcctttagcatttgcttccttaataactgagcgcatttttgttccaaaaatatttttttctactgcatgctttaaaaggtcatctaaattacttattggtttcataagctgtacaccattttcaatttcagttaagcctttatcaacctttaagaaagggacaatatttttttccttccaaagataatcaggtgtatattgattgtcaatagtgcgatacattgtatcttcaaataatatagcacccaaaatatattctaacgtaaatgccggactctttattatgcgttttctcatttcatgtactaatccaaacatttcatcctcattagaataactgttttctttaatcccatactcaagtaacgcttttggagtactgccaccactttgatctaaagctgcaataaaccctttacctgtatgtattcgtttcatttgattttcattcatctaattctcctccttctctttatcttagattagaatcatgtcttactttttattatagtgtctttctctattaattatgcgtttgctaatatcataaatttaagtacatctctaataattatcatttttagctatagctcttatctcttacttacttcgacacactcgaaaaccttgatctggagccttgccacttgcatcatactttcctctaaacgctgcctctccacaagtaacatcgccaatccagcctccgcctttagttactttcacagatacgctgctaatatccaaacctttataccagtcccaacaccattctcttacattgccagacatatcatatagtcctaattcgttcggtttcttcatacctatagattttgttttgttattattattttgtatttcaggccaattccaattccctgttaaatacttatctccagcatttctacaataccaagctacttcatctgcattgttgcttccactgtatatataattcttactcatctgacctccacttgcagcatattcccattcttcctctgttggcaagtgataaccattagctccttcattaatcattattatccattttatatcatcattattatttttattatcaggatcctttttatctttgtctatattgtaatacggcttcagcccctcttttagactccttttattacagtattcaatagaatcataccagctcaccatttctacaggtaagttattacctttaaattgtgatggattacttcccatgatttcactccactccttttgagtaacttcatacttacctatataaaaatccgataactttatgttttttccataatagtttgactttgtatttacaaaatctccacctttgaccaatacaagattatcacttatttctttagaacaagcactgacaaaaaccattattatcattaaaagaaatattaataattttctcattaatatacctccttcaaattcatataaaatttatgtgaaataatatctcaaagttaattttactaactgaatgtttaaggccgttcatctttcgagaaacgacccctgaaatattaagacttattaatcaagccttaaaggtaatatttaagcaatatacaggtaagtattttcaatctataaatctgctaactataattctaatcagccttaaaaatgagtaaaaattttttaataatttcaaatcacttaagtataaatcatcttcatatttctagacaatctattcccatactgttacattagcacttccactactttgatatccttctgttgctatcatctgataagcccaactagaacctaaagccattcctttacttccccatgcatcagcgtgatttttcatagtaatggtattattagtaccaattgatctcttagattgtctaacactccagaactgttggaaagttgtaactccatcgatagaaggtgcattagttctagtagcagtatatatatcgtatgtgcctccatcactagttacagtacccttgtaatttccagtcggcctataagttccccagtcatcaacaacgtaatattctataagtgagttccttgtccatccatataatgataaataaccattacctgaaggtgcaaattgaccagcattatagtttattactctagtgtatgatccagcattccagcctttaccaacaacaaagttgccgcagttactccaattaacgctataattaccgccagatccattaactgcgtttactgttccaccaccgtctgtccaattttgccaatagtctgttgctgctgcatatgcgtttacgtttacaacagaaagtgcaagagtgcaacacattaatgacgctaaaaataattttaatcctctttttttcattttcatttcccccttttgattataacctttaagttacattacaccataaaatagttttatttcttctactttcctgtatactacttgaatattaccgtttcttttaatcactcactttcacttttttataatgtgctgacattttcagtgtttaccccaatgatattctgttaataagttacttaagatttaataataataaaattaattttctgaaaagaacttagagttattagaataattttaaaattagtttaaatcggttacatacttattttatccattttacatttaataggaaatataataaattatgtattttatataaatttatatacacatttctgtttatggcttacataaatcagcacaatatgagaaaagttcattaaaatctaataatttattgcagaaatattcatatctaaatcgaaatagcctaataaaatctaaaaagactaaaaattcaacataatctgcaatcactataaataaagctcaaagaaatgatataagtcctttgagctttattattatttataaattcacatataggtgattaattattatccaaactaatgagtaattgaatacttttttatgaattacgcataactaatgttggaatatattaaaatgattaattctattaagtaaattacttaatttagatccttcaaatgattaattctattaaataaattacttaattcagatccttcaaaggaacttatttcactagtaaattttgctttaaatgtactatggaaggggaaatatcttatgaaaaaatctactatagtgttttttatatttttattattgtcatttactaatttagctcaaaataccagtgctgctcccataaatttaagtcaaggtatttataatgtacgagatattaatctaccaataggttctcctgtgacggctagaattaatgaccctaatggcagagttattattttcgtcattgataataatcaatacatgagagaacttacaaggctagattctcaatcaaacgaacaaactctcaaaccttttaactatggctattcagttataatttttgggaatactcctgttactttctcctaaaaactttcccaattcatatactttaaattttttacacaatagcagcaatataatttcaaaaccaaaagcagcagttaaactttttaatctactgcttttaaatgtatttactcaacagtgaattttatatttatttcacatactcttcttataagtgcaatagagcataaaaaaatcgcaggcgactgtggagctgaagattttttcacgcatctgccttttcgaacgcatgtgagaaaaatctgcacataagaaatggcagctatgctgcatataagaacattttatgtaggcgaatatgatttatttttttattcttttatagtattaaccatagtaaaatatactactataaagttatccacaaatttaattgcattataatttcctaaagaataaaaaaatgcagtcaagttaatgactgcacttaatgggatctaaagtaaaaattgaagataattcaactttcacaactacattttatcacatttatttataaattttaagaaataaataaagcagtagaaaaatttcttctaactactgctttttgttttactctattgggcaattgccttcattaatgttacaacatcatcttcacccggtaaccaagcaccgccttttttagttaatgttattgttactgtctgtggttcttcttttaatattccagaagccatactgccgcctataagcttaaaagcttctgtatatatttgttgtttagtcattgaagggttttcagtaacttttttcattatttcactttggccattttcagtgattttcttcatatcaaacccttttattttaacttgaacttttgatgtgtccttatctgttgatgcagaaaccacttcatattccactttagttaatcctgtaataatatctttcttaaaagaattttttatatcatctgttagaatgctttcatctaaacctgagtttccaagggccatcatcattccatcatcaaagctacttctaaattcagtataatcttcttccttcatccctatcttgtccatattagttttatcatcttttaaaagtagatctaaaaatattttagcactttcttctggagttgcttttgttccgcaacctactagcattattgttaccatcataacagctaacaatatggtagaaattcttttgatttttttcattattattccccctaaaatatagtatttaatttcatatagcaatacattaattaccacatggttaatattttattatattttccaattaatttcaacatttatttcatattaattcaatacttgggcatatatgtaaccggttaagttaaataataaagaggcaaactagaaattcttaactagagcgcctcaattgctttattcacatttcgctataagcatatattacaaactataatataagttgttggaaaatacaggactcgaacctgtggagcttttacactcactagcttattaagccagcccattaaaccactctgacaattttccatataagagaatattatttaattgttctccttagcaattcattgtactcattcagtgcaaagtttaatcttctacacgcactaatcacctccctatctaatgaatttccttcatcgcccataattttgcataaggcttgtctcattctactaatcatcatctctttttcttttaaatattccaaatttttacctcctttacttttttattagtataacccttaaatagtaaaatttatgtatcacttgttacataaatacaatgtaattaaaatgttgatattatttacatatattctatgtataacctttgaacttcaaatttaattaatctatataataaaaccatggaagttatattgctagataagtaatttcatttttatttcataaattaattttctgctaaccttaggcatattgtttaacatttattaactgtatctaatatattaaaagtaaatgaggtgtttatgatgccaaataatgaaaatgaaatattttatatcgttggcgccatacttactatattagtaaacgtgccagagattataagacaaataaatattaatttaaaattcaacgaatctataaagcaccataaaatactatgattaagatgcagaaaaaagcgcttagaataattctaaacgcttttttcttccgaaaattaatccctctataatttagaattttatcttagtcaattacagaaatatttattttactaactatatttaataataaaaagtattacttctaattcaatgtaatactacagagacatattttcttatttacaattaatagatatcttaacagttatctttttcttgatgatattgggtaattgtaatcttgtgtaaaatgatatctgcctggattttctggttggtttcctgaatccttttcttcctcaaattctgatgctatatcttgtcttaaatgtttttcataatacattttttctttatcggttaaattcttcatacttatatcacctccatttttattgttttcttttgtatgattaatatactctagtataaaaactgcattaaaatagacacttacaagttatacgtaagtgcctagattatttagaatattgaattactctaaaaaataaattaactataatcattagattatttaaattttatatttaaattgattccttatcacattcctagtttatacatcttcgatatatatcagcattatttctcttataaataagtattttttaaataacttatattttaaatttagctataatccttcttaactcttcagacatttgagatagaagtttactagatgaagctatctcctcaacagatgctaattgttcctcagcagctgccgatattgtttgagtctcattagctatattactacttatgtttttaatattatttactgaatcaacagattctttagttccaacagttacttcagtgatagaatctgatatttcatgaatctgactagatatttctattatcatttgaaggatttccttaaaacttattcccgcaacatcaacgacatctgctcctgttttaacttcttttgagttttcattcataacagcaactgcactattagttttattttgcacatcattaataattccagctatttctttagttgcctcttgtgattgttctgctaactttctaatttcttccgctactacactaaaacctttccctgcttccccagcccttgcagattctattgccgcatttaatgctagaagatttgtttgctctgatataccttggattgtatcaagtatttgtccaattttcactgatttctcttcaagctcgcttataatatgcgatgtttcactagtctttttctctattatttccatttggttcattgccttcactacagcatcttcaccagcatttgctgatatttttgccttatctgttaaagatgaaacagattttgtattttcagatactacatttatcttattagatatgttttcaaccactttgtttgtactattagcaaaagaaaattgctcatctgctccatgtgccattgttgttactgcggatgcaactaaatttgatgcatctgctgattgctcagcacttgctgtaagctcttcagatgataatactaactgctcagatgtatttcctaattgttttattagttcaataatgtttttggtcatcttatctatcgcattacttacaacaccaaattcactcttatcattaagactttcttcttttatctttacagaaaaatcaccttgtgataaagaacctatgtatactacaaagtcatttaatctctttgtaatacgttttgttattagtattcctaataaaattattaatattgaagctatagcaacaatacttgaaaagattattactgcaattttaaaatttgctttattttctgcatttattttctcagcaatttgtctattatgttctccaagatcaactaactcctctaaaaatgcatcagcatataattcaacatttttttcataatattcgtaagcttcttgatttttgttttcattagctaaatctagtgcaacttttctaccttctctatatttagctaaattactatcaatctggctgaccttatcagcctcaaagtcatctaattttaattttttataaagagccatataattgttaaattcttcagcacgagtatttatatcttttgttaaattactattttcatttttatcagtagttaccataattctaaaaatgtcagctgaaatagcccttgcatgtactctagactcactaagccattcacttgatagcaatctttcactatacataacctccatacttttactagacgtttgtaaaaaatagtaaccggttattccaactgcaaataatcctactaaagagcagattataagtatcgctaattttctacctacctttaaattattaagccacgtcattttattgtcccccttatcttcatactaggatcttaaatataatttcattattacaatatatttattaaaatgattaataaaaaataaaaaaccaacaaaaacttaatatatttatggattactaagttttaattggtcggttgcacaactagctccaaattctcaaagtgcccagatatagagaatttttcatcgcttccaattgttctattttttataaatacacttacctaatatatagaaatattatcatattcatgtaagaaaatcaatgattcttaatataaattgtcgaatttcattccaataatatcctaagttgccatttaaacatactcgttttagatgtccctaattaaacctctcttatcattataacaataaaactttactctgttctagcacttaataaattcattaagccaaaataaccacctaaattcttgggctttaattaatatgaatatttcattattattgaaagttcaaaatagattatatataaatatttaaaaggctaatgctattttaatttaacagcactaacctctaatttttccatgataataaaaatctttttagtcgtggacagaatattaattcgaataaaatgatatttttattctaaagctactcatttcgctcctattttataaaataatattccacctatttttctggcttaattgatgtaataaaatttttataattttctaaacgcttcttatactcttctgatttccttaaattcatagttgtttcaactgtctttttaatatcatcagcatgaataaactttcctgacaatgtatcatgagcgtggcttaattgttcttctggaaattcaaatcttactctaccttcaacaatcttaacttcaccttcaataccacataggcagcagacagcatgtgtagattctctatctaagaagaaatttctactatggcaatgtggacatacgccttcttcacccttataagaagcattttcaatgtcttttgcagcttctgcaagattctttcctatttcatggacttttgaaaccttctcatcatctacgattattgcagttgaccatggaaaaacttcattatttataactttccacataggagtcaatgcttggattcctgaatcacattggaattctgtaacccaatctgaacctccaattcctatataagaaaccaccttatcttttagaattcttggatctggagctttaccgcctgtttcctctgcaatcttagtagctacaacattattccctctatccattcttggcccaaaacgatccctaattgttaaaaatgcacttggagcacctttacaaaaaatagggtttgcaaaaattattccatctgcatctaacatcttatctaataaccaatcaaagtcatcttttaaggcacacatatttccctttcctgtcataagtgagttaacacaagctgtacagcctgtacaaggttttatatctaaatccaataaacgaacaaattcgatttctgcccccatttccttcgctgctattaaagcttctttacacatagcatcattattactatcttttcttccacctgaaatacctaaaattttcatgttttatacctccaattattgcgttaatgtaaaatctatacacaacgtatcattcgttactattttagcattcaacaattatataaaaaattaggtattatattttattaactgtaaatttctatttattttttaataaagattataacttcgcaagcattcattaaattttaacagtaaaaatattaaaattttacataatcattttcatcttgctttattatatgttataatcctttcttgataacgctataaatttatcacatcatatattagatgagttaaaatttatatattatctcttatggaggtattttatgaatataaatcaggaacttataacttttaaaacctcgtctcccatggaattttccgttctagcaattgaaaacctagaacgctattggcataaaagcatagagctaatatatatattaactggcagcgttcgagttcagtgtcgtaatatgcaatatactttacatgaagacgatcttattcttataaatatgttcgatgtacattccttatatggaaaaaaatgtgaagtattatcactaaaaattgatatttctgcattggaccctgaaatttctcgctttgcccaaaataggtttgattgcaattcatctatagaagcagataaaaagaaatttatacgattaaagcgccttcttgccttaattgtaaaatctaatgttaacccagacgagaatgttgaacttttgaataaatcatatatctatgaattgttatatatattaactagcacttttaaagtggaggactctgcaaattctacagatataaataaaaattcagagagaataaaaaatatattacattatataagcgaaaattatagaaataaaatttctctgaattctttatcagatgagttttatctatctatgccatatatttcaaagatatttaaagattttataggcattagttttagtgattacctaatagaaataagactttctcatgcaatgaaagatttaactgatcctaacttaacaattgaatatattgcagaaaaaaatggtttttctaatacacgttcctttgtttcttcattcaaaagcaaatacttctgccttccaagttcatatcgaaaaaatatggatgcatatgatcttggcacaaaaaagaaaattacggaaagtgtaaattattttgctttacgccataatacttcatttaatcgtttagtagattatctaaaacatgacgttattattccagaggcgactaaacagcatactacaatatgtgaagtaaatccaattgatatttcaataaagggagttcagttaaagcatacatttaaaactcttatctgtattggaaaggcaaaacatatcttaatttctgaaaatcaagatatgctccgtgaaatgcaaaaagatattggatttagatatatccgttttcatggattattcgatgatgagatgatgttttattctgaaaatgaagatggtgaatctgaactatgctttacttatattgatttagtagtagattttcttctttcaattaaattaaaaccttttatggaactttcatttatgccaaaacaacttgcactggatccttctcgtacaatgttttttattaactcgattattagccttcctaaaagcatagaaaagtggacttatattatcgaagaacttatcaaacatttaatttcccgctatggcaaaaaagaagttgaatcttggccgtttttcttatggaatgagcctgatttaatagaaatgtttggctttgaaaatagcaatgatttttttattctttttaaagagacatttacctccttaaaaaatattgatccttgcattaattttggaagttcacctgttttctctaacacattggcaggttcaaatgactggatggacacttttatgaatttctgcaaatcaaataactgcataccagattttttaactatgcatttttatcctatgagttttccagatggtgattctactactctttcgaaaaaacttcatttagaaatgcaaaaatatcttgtatatgtagaatctgaaaattctttaaaagaaaatattcaatgtattagaaaaagaatcaaagaaaaagattggaaaactgaaaaactatacttaatagggtggaattcttcgatttctaataatgagctgataaatgataccacctataaatcagcttatattgcaaaaaatatattagaaaattatgataatcttgaaagtttcggttattggcaattatctgattttacagaggaagtaaaaatgaaaaacgaattgtaccatggtggacaaggtgttttcacctataacggaataaaaaaatctcattattatgtttttaaaatgcttaataatcttggtgatatattgcttcaaaaaggtgatggtttctttataactacaaatggatcttcgattaaaattatcttatataattaccagcactattcaaaactatatgcagcaggcgaagtgtttgatatgacttttactaatcgatatacaccatttccaaaaacaaatatattaaaagtgattcttccatttataaatctttctgaaatctgttatgagctaactgagactatcgttaataagaattatggaagctcttttgataaatggcttgaattaggtggattgccattacaaaataagactgatattgattatctaaaatctgtatcactaccaagaattcaaaagaaaatcatcaatactgaacataagtcactaacaataactgccgaactagaaccacatgaagtacgattaatagaattaaagcccatttatagaaatattaattaatcatttttcctttaattgacgccaatctcttaaaaagtagttttataaacctaatgaccaaaaaatcctaagtagaattaaaaatctaattctacttaggattaatttatgattttgttcctttatctcttataatattctaatctagaacaattacctattcagtaattacttttctatattctagtcttaattaagtacttactggtcaaagttttaaatttttgatccccaaatagattcgtcatttgagccatagctaacaaattcacaagaaccagcaatatcattctttgaataaccaaacatggaaattgaactttccaaatactcatatactgctgttactagccatccatcttcgtttaaaaattgttgtataattattttctatttaaaacttttatatactaaaactcccccactcttcacaatcccatatatctgtagcaatatctttataaaattccggctcatgacatactaaaatcatacttccttcatattcttttaacgcacgctttaattcatttttagcattaatatctaggtgatttgttggttcatctaatactaatacatttgtatattcattaataagtttgcataatctgactttagcctgctctcctccgcttaatatattaatagggctatctatatgctgccttgttaatccacacctggccaattctcttcttacctccgtttgagttaggtgaggaaactcactccaaacatcatataaaactgaattagtgctattccatgcaatttcctgctcaaaatatcctatttttctatgctcacttaaagtaatttcaccatttataggttttagcattccaagtaaggtttttaacagagttgtcttccctaatccattagctcctgttactgcaattttttgtcctcttttcatttttaagtttaaaggtttgcttaaaggtctgttatatccgataatcaagttgcttacttcaaggattatactttctggcatttttacagttttaaaattaaaatgaggttttataatttctttttttatttctattctttcaatcttattaagtttcttttctcttgatttagcttgctttgaagttgaggctcttgctttattttttcttatataatcttcaagcttttctatttcattttgttgttctttatattcaatcaatctctgttcttttcgtatttcgtatagtttaataaaataatcataattcccttcataccttgttaatactttttgctcaagatgataaactacgtttactacattatttaaaaaagcattatcatgtgatattaatataaatgcattttcataatttgctaggtaattcttaagccattcaatatgctcttcatccaaatgattagtcggctcatccagtaataaaatatctggcttttgcaaaagtaatttagcgagtaaaatcttagttctttgcccgccacttaaagttgaaacatctttatccaaaagttccttaattccaagacctactgcagttgcctgtattttagaattaatgctatagaaatcatttttatctaatatttcttgcataatagcaattttattcaaagatttttccatatccttctcactcatattttgaagatcaatatataaactattaattttactttctatattaaataaattagcaaatgcttcttttaagaaatttaatgcatcaattccttctttcaaatcaaccaattgatccatataaccaatgctgaatttattattccattcaatagtgcctttatctggtaatatttgatcagtaatgattttcataaaagtcgactttccttctccattagcaccaataagtccaatatgctctccttttaataacctaaaagatacatcattaaataatattctatcgccaaatgaatgactcatgttttcaattgttaaaatactcatattttacatctccttgtgtcctcataataaatgatatcatcatgtaatatgaagaccaagtttaagaataaatctgtaatgtttataatcatgctgaaaaaaggcatgttctccatagtaatgactgtgaaaaatatgccttttctcttatatttaagtagaatttttttgtttccttattattcttctaatactaccttcagttaaaaaatactgtttagctaaaattttaacggacattccagatgaatacttattaaaaatttctttatctcttgcactaagatatcttttagtctcagtattttctccccatgattttttattttcattttttcttggtatatagatatatccaccatctgtatatttttgaattagttcaattatattatatggcaatatattttgtgctttttcatatttcataatttcttcgctccactctacatttaatatctaaatgaagatgcaaagacctattataatatgaaaaacttaatgttaatatattggctccaggcaaaagtttttcacatattataatctttgcatggagctaactactattactagaatcataatgaattcacttcctttttattctataatattatatcacaataacttgtgtcaattttgacgctttgagcctcaaatgtaattcttattcctaaatcctaagaagatacttcattataatttaactcaacttactaaaaacacaatcaatatctctagttattttagtatctataaatccattgtccatcatactttttagtatttccattgctttttcgtgggataatccttctctatatggtctttcctctgtaagtgcctgataaatatcaagacaagtcataagacgcgaattaaaatctaattctttgtctgtcataccaaaaggatatccctttccatttaacttttcatgatgatttgaagcccactcagttatatcctcaaatccttttatttcttgaagtgctaatctagtgtactctggatgtttcattataattttaaattcctcatcagaaagtttatctggcttgtccaataaatcatttggcaccgctagtttaccaatatcatgaagatctgcagcaataattagcttcatcttttcttccttctctaagttatagaaatctgtcataatagctgccttctctgataagccttgagaatgcctttgagtatagctagatttagagtcaataatctttgacaacacattagttataccatgaatctcttcaaatgataattccaggctatgctttggaattcttttttctaattctatactaataaaactattttctaaattcatccagaacttttcctcttcagtaactttaaaaaacgcttttacaattcttgaagaaaatgatatattttcttgattccttacaaattcacaaactttgttttgcatattgtgattattattctgcaaatcaaaggtcttttctaaagcatcagcaattgctataatttgcgacattagaggaatttcttctcctcttaatctaaagaatcctgtaccatcatacctttcatgatggtactttattatatttttcacattagtaagcaatggatagtttttaatattactttctccaattgtacaatgttcttttaccccttctaataatgctgcattttttaattcttttgtagccaatttttcatgcaggctatattcacttaacccattgtcatgaagcattgcaagtgcagctacatcatggagctctttagaattcagacccagttctttagcaatactaattgaaatatatgcagttctttttccatggttagatgccatcccgagaatatccatctccacaaagtctaaagcaaatgaaacagccattagaaattcatttaacctaaataacataattctcccccttgttacatcaaacttatcttttgtataaaaaaaagcgaaaatagtataaaaatattttatactattttcggtacttttaccacaaaattagttcctttaccaattatgctatctactgttatatttccaccatgtgcttcaactatagacttagaaatcgtaagacctatccctgctccacctgttaatttatttcttgattcatctgctctataaaatctctcaaacacataaggtaaatcatcctgagatattcctatccctgtgtccttaacgcttatttcaatataattgttatcttcagatatattaacatccactttaccacctttttgagtatattttaatgcattagatattagattaactacaacttggcttattttatctttatctaaatatccaacaatatctttctcatgaaaaattaaagatacacctttatttaaaaattctttttcgaagtttaaaactatatttttaacagcctcaccaatattaaattccgtcttatttaaaacgagattttcactttcatactgtgctaacttctccaaatctcctacaagacgtttaagtcttagtatctcttcatggcagcttataagcctctctggagttggctcccatattccatctatcagcgcttccatatgactttgaagggtagaaagtggagttctaagttcatgggaaacatcttttgttagtctttgccttaatttttcttgttcattaagagaatacccaagactattaatggtggcagttagtttgtctagctcctcaacatttgatttcttctcaatcttttgactataatccccttttgaaatcatctctgctatatttataaccttcaaaattggtctgcttaatccttcagccattatcaatcccaatattaatgcacataataaagaagctgctccaacacctataagtattttatttagtgtttttgaatacattatgtcattttcatcataataaaaagggccataatgacctatacttatatctcctactttattagaattatttattattggatattcatctttagaatattcactttcccaggttggaaaaatcttttccattgtactaatcaaacgatttttaacttcttcacatttaatattattgtaagtttcagcatcccatattactttatttgatgcatcttttacggtaataaataatccattttcaattgcaccagcgccaatactttgaattgcttcaacattaaaatttgaactattgctatactcacgacttatagctgcaacaataattttattgtctctttgacgttcttgaataacataatttttaaattgatttacaagaaagaaatgtgaaaggatactaataagtgctacgcaaatcattgttataaatatgtatgaaagtgaaagtctgtttctaagatttttcttcattaaattctcctccaaacctatagcctgttccatggacagtaattatatactgtggatccttaggattggtttcaatcttttgtcttatatttttaacgtgagtatctacattacgatcatatccatcataatcatctccaagtgccgtacttataagctcttcccttgtaaaagtcttgttaggatacttaagtaaggtcatcaatattttatactgccttgaggtaagccctatattctctccatttttccgtatttctttctttaacatatctattaccaaatcattatcattaaatgaaatttcattagataaaggtacaacttcttcattaagtcttctaaatattgcatatattcttgctataagctctcttgggctaaaaggtttagttatgtaatcatcagcacccatatgtaatcctgaaattatactcttttcatcaatttttgctgtaagcattataattggtactctagatctttttctaactatactgcagatttcttcacctgtcatatctggcagcattaaatctagaactattaaatctggattaatcctttcaaagacctctaatgtttgatttccatcatatgcttcaaatacaattgcaccttctttttctaaatatgattttataacttcaactatcttattctcatcatctactataagaacctttttctcttccagcatattttatcccctatctgattttaaaattataagttaaatgtttaataatttttaccttatattacttttatttaagaatactatagaaattttaatttaatttttgcaaaggctgcttttacttaaaaatatcatatgtaacttagttatttgaaattccggtattgcactaaatataataattacagcttatgttgtagaaattacaaataaactattcttagattcaattcctagtttgtcatttacttttatttaactagatgatttatctttatttatatatcaaattaagattatatcctatcctatttcattctgccacgatataatcttaattcataattccctaattaacaataaataagaagctctatattttatcttttattattttttctacttcatttagataatccttgcgggtttcatcagaaacataaggaactgcaccaaaaaatctatgtccaattacttttataccatttaaaattaattcctccttaaatttaaatacattctattttcccttgaaaaaataaatatattctattcttactagatgtctatgaagcatctatttaaatgaatatttacaaaaaaattaaattatgtctgtatttaaagaattaatcatttcttatagcttgatttagtgcatcatttactgccatcataattcccttacttgtcattgtggcaccggatactgcatccacctctgtagattgtttttctataatttcactcggaattactgctaaagcttcttttccttttgtttcattattagatacaatctctacatttgtgattttgtcatcttttactgtaactgcaacttttaactctgggcccttaccttgcccaattccgtcataagttccatcattatattttccttgattgttagatgttaatgaaacattgatttccgcttgacttaaagcattatttactgcttccataattcctttacttgtcattgtagctcctgatactacatcaacgcttgtagattgtgtatctatgatttccttgggcactgtatttaaagcttcttttccttttgtttcattgttagatactatttctacatttgtaattttgtcatcttttatagtaactgcaacttttaactctgggcttttaccttgtccaacacctgtataagttccgtcattgtatttcttttgtttaacatctttgatctctgcttggcttaaagcatcatttactgcttccataattcccttacttgtcattgtagctcctgatactacatcaacgtctgtagattgtgtatctacaattttgctagggatagtatttaaggcttctttgccttttgtttcattattagatactatttctacatttgtgattttgttatcttttatagtaactgcaacttttaaatctggattcttacctttccctactcctgtatatgttccatctttatatttcttttgctctgatttgttaatatctgaactactagcaacagtattatttgatgaatgattagggattgtatccttcataacaccacctaaagcatttactccagtaaatgcagcaatagctattgcactaggaagtaatggacttacatcttcacctaaaatatttactttagtattttttctagggcaaacatctatacacttaaaacaatttatacattctccactgctcaccttatccatttcataaagctttattcccattgaacaattatttgtacatattctacaaggtccacatttgtctctaagtttctttatttttaaaattctagccttcgataggattgaaaagacagctccaagcgggcaaagatatctacagaaaaatctttctataaaagctgctccaattgctattattgcaagtattataaatcctcctgtataacctgctatagcacccgaaatattatcaagctgtgcaaatgcatcccaaggactataactatcaaacgctgtactaccacttgtccaaataactactattataaatagtaaaataacatattttaaatattttaatatagaatctactttttcatttactttgaattttgttttaaatactttttttgataccatgtagataaaatcattaatagctccaaaggtacaaagccatccacaaaagaatctcccaagtactatggttataataaaaattgtaatcattgctaataattgaggccatactgatattacatcaaaatttcctttaagaaccattgagtatagctttttaaattgattaaaaatcactgcaactaattctggcattaaaattaaaaacataatttgagaaattaatctcaatccttgtaaccttgatattgcttttttcatcgtctctctcccattctactatccatgttaataaatttgtttttctcttataggctatccttgtaattaaattctgtattggttatcttaaaattattttttattcctgatgttgcatatacttctttatttttagtaataaaaatggcatcaattccttttaaagattctattagtttgatactcttttcaagccccataatataaacccctgtagatagtccatccccatcaatggagtgatctgagattatcgttgagcttataacctcactttcagaaggatatcctgttttaggatcaattatatggtgatatatctttccttccttagtaaaatatctttcataatttcctgatgtaactacagatttattttccacactaataactccaatatgttctccacgagtatcaacagggttttgaatacctactttccataaagttttatctggctttgtgcccaaggcataaatatttccaccaagatcgattaaagcgcttttaatcctgttattctcaaaaactttctttacttcatctgcagcatatcctttagctattccgccaatatcaattgcttgctttgtatgttttaaacctattgaatggctcttttcatcaagaattatatcttcataatttacgagtttaagattacttgtaatttcacttttacttggtattctaggattatcacttcctatacgccatagacttactataggccttatagttggatcaaaagtcccttctgataacctgctgtattctactgctttatttattacaaagtaagtatctgtgctcacagcttgatttgacactccagcatttttatttatcatggagacctcactaaattctttaaatacagacattttattttctataatattgagtctatccatagcttcctgaatagctttttctcgattttttccatccactcttaatcgtattattgtaccaagtccataaaattctcttactacagtttcttcactttctttttcgtttttattaataacataagctgcaatagctataataagagctacaataacaattactaagaatatattttgctgaattaatccaatcaatttttaataacccccagaatataagattttacttttttgaaactatcaaaacctttgtgtttcctccaatctatatttacaatttctgaacgtattctaacatttatttgtgtgaattttatggggatagtaattttttaaacaaaaagaaccaccacataaagatatatttgtatctcaatgtaagtggtatcaatatttgtatcatatctattcttatttttgatgttactttcctaataattcatcaactaatgctttattattttctacgcaatgcccgcagccagttccaacttcagttttttcttgaacttcttcaaatgattttgcgccattagcaatagcattctttatgtcttttactttaacatttttacatccgcatatcactttatcatcatccattatattgcctccttagttattgttagattaaatataaagctttttacactgaatagttttaacacttttatttttattatgtatactaatagtgaaattcaaagcttttacaccccaaatccaatattaatattttgggtgtaaaagctttgattaataaaatttcacaaattcagcagcaggctttctatatcctctaattttattactactcttgtccattttccccatagtaatcattaaaactggaacttcattctctggaatatttaataacttaccaatcttctccttctcaaaataaatcattgggcatgtatcccagcctttgtctttagctaataacataaatagcatcgctgacaatgaagcatttcttatagcttcttcatgcttaaattcttctccccaaccttcataaagactattaatagtattaagcatgatttcataatcagttttatcaatcattccaagcatcattgagccttcataaattttatctgctgataagtatgcgtttttatcacctgttacaattatagttgctgaagcagtttttattttgtattgtttaaatgatgcatcataaactttctccataagctccttatcttctacaacatagtacctagcatgttgcaaattaaaagcagaaggcgccagtgaaagttctctaaatatatcattaaaatcttctctaggtattttaatattttcaataaatttattagctgatcttctttctcttacaatttttaaaaaatcattcattattaaccctctttttattcttattttgtttaagaagttcaaccaacctccctctgaagattagttgaacttatacaattcttaattttctttcttcatttctaaaatcaaaatatgagatgtctctttggctttgattaaaatatcttcctcaactatttccattccatctctattatttaattcaatgtcatttattatagcaccaccttctatttgaaccaaataggcctgtctcccttcattaacttgaaaattaatttcttttcctttatcaagttctagggaataaacatttatatcttgatttatttttattggtgcatttccatttttactcgaaaccatatgaagccatttattttgtctatctctccagtcaaatctataatctccataattaggcttataatcttccttatctggaaatatccatatctgtaaaaatctcaactcatctttccctaaattatgctcgctatgatatacgcctgtgccagcactcatgtattgaacatgaccacgagttattgtatttttatttcccatgctgtctccatgtgtaagttcaccgttaactacatatgatattatttccatatttctatgtggatgagtatcgaatccagtattagattcaactaaatcatcatttataactcttaaaactccaaactttatattatgtgggttatagtattctgcaaatgaaaaatgaaatttgcttcttaaccatcctagattactactgcccatatttccgctttcaatttttcttaacattttttaccctcctccattttatctaactctatcaaattttagaacatattcgcaaaatataatttatgaataagcaatagataatagtaaatatttaaaatgtattactaataaactcaaagagttttttctactactcctacttcttcactcttttcttttgctctattataaaatctggttaacacttcagtactaatcagttaattactaattagtactatttctttaaaaattaaggtgtaagttccactttatacacctgataatttctttaacatatttattagattcttcttctcttcaacacttaaagtgctaaaaatttcatttaaattatctacatgtttagggaagagttcactcataagctttcttcctttttcagatatgcttattaaacttgcgcgtctatccttaggatcaggacgtctatcaatcaaatcatctttagctaagttatctataacaacagtcatattaccaccagttgaaagagttttttctaatatttcactgactcttaaatctcccttatgatacagtacttcaagtaccccaaattgtgaataagttaatcctccttctttgataatcttaagttctcttttgttaacactttgtatgcatcggcttaatgctataatagtttttaaatttaaatcatttaattctccataagttactttattcttattcatggatataatattattactaattagtaataatgtcaaggtatcatatcaaaatagttttccaaactaaaaaagccatctaaaatttaaatattttaagacagcttcttcaacgtataaactctatgtatgttaaataatatacttatgctattatctataacatattactacacttcatgaaggcatttattagtaggactttcaatccagattccctcataattgtatcttgaaccatggcaaggacagtcccaagtcaaatcatcagcattccatttaagttcgcagcctaagtgagcgcactttgttgatactgtatatactttgccttcattatccttatagacaccagccttttgacctttatattctataatgcctccatgaccattttcaatactacttaaggtttcctctggaatatttatcctctccgcgataaagttttttgcagttatgacaagatcctttgcagcatttttcatagatgctgacatgtcaaatcttcttggcgagaatatttcagagaagtcattttccttttcaagaatcatatctcttattatcattgctgcaaccattgaagttgtcattccccattttttaaatcctgtttcaacataaatattaggggttttagatgagtagtgacctatataaggtatattgtctaaggtcatacaatcttgagtcgaccaatgatatttttctgttgcatttggataaaattctttagcaaactttcttaattcctcgtatgctcccccttcttcattttccccagttcttctggctgcaccatcaagtattaatagattcttataatttctaaatgaatatgtattttgatcaatacctttatacattcccttaacatcttgcgcattttctaaagctatagcatatgctctttcttgatgcattctcataaaatagtaacctggagtatttaagaatgggtaatgtgatgcaactactattttatttgctttaattttcatatcattttttgtaactacagtattatcctcagtaatatcaagagctactgtattttcataaatagttaactgttctgaaattgatcttagaaattttagtgggtgaaactgtgcttgattcttaaatttcaatgcttttttagcttttataggaatatttacttcatctacaatctccgcatcaatttctaatcttttcgctgcattatattcgtcttcaatctctttaatgttgtcagaagtatacaagtatgcatctttatgctcaaaatcacaatcaattttttctacatcaattatttccttatatctccttatagcaagttcattggctcttgcatattgactagcgccatcttcaccaaattctttaattaatttatcataaattaattcatgctgagatgttattttagcagttgtatttttagtaacacctcccgctatacttctagcatcaattacaacaacatctctcccacttttatttaacatatatgccgtgagcagtcctgccattccggcccctattacaagaatgtcacattgaatatcttgatttaaagtttctctttttctaaaattaacttcggaactccatacactttccatgtaaatcacctcatgcttagtattccatttttttagatactatacacagatttctattagttcccacaaataatctcgaaactatggattacaaaaaaactggaatataaattcctaaagaataaaaaaagcttctagcacatcataagcaattgtgctaaaagttttattgaagatacaattactagtctatatcttcagcccttttgaatattttgagcaagcgcaaatagtgattagcttcacgtagcgtatgatctcccaacaatggtattattatagacttaatcttacattctactagaccttgagtaccttgtgccttaaaatttcttatagacttggttgcttctaagctttcatctgtaactttagaaattggaattgatttattcatagctgctcttgcttctctagttaatatatcaaattgatgaccaaagttatttgctgtatttattagctcatcttcagttggatctagcaatcctcttataaactttgaatgttcagccataattctattccaaaaagcctcctgttcataagcttctctctctatatcaatttcttcatgattttgaagcctttgaactagcataaaataaaactttgcttctcttaagatgtggtctataagcaaaggataattaactgtaaatatcttgcatgataagacatctgataatagtctagatttaaacctgattaaaccagctgtcaattccaatgctctattgttaattgtaaatacttttttctctagttcctcatgattatgtctgctaaaagaatcactcattaattcagcttccactttagtaatattagtggcgatttttactcctgtaaaatatgccgatgctttttcggcttcaagtgtaaaaggagttactacttcaccagattgtaatacatcaccgcctacaacaccttctgaaacagtaattgcatcatataaaagattgtcaaatcccatcctaaaagcatctgcttcttctatataatttgaattctttggcgtaaagcctatttccaagaaaaatgaatgttccttcataattctcgcaaagaaaagatgtaattccaaggattgtcgtataaaattaccagttgataacacgttaatttctcccatacaataattaaatatcaattttattatattatttttccctgctaactgttactttctataatactttttgaattaaaaattgtttggtcataatgaatttacctataataaattagaagatggctttaattaaatatgcattcaaatatatttaagagtggtctttataaaataaatagagctatgataaccttccataactctattatagatttctattgattatgttttacattaattgttgcttaatttaatattaagctcttttcttaatttcttcttcactttcaatatctagcaaatcatctttcctagatattgctatatcacatgcttgaccaaagtatgcaaactttactccaaaaagataaatcagtaatcccataagagctaagtataaaacaatatatagcggtcctaagaacgctgttggaaccgaattatacaaagttaatgttccaaaaaatatgaagattacgcctgctacccattttatatatatatctggtacatgcttgcacatccatgctcctcctaaaattcctataccatctgcaataagcattcctactgtggttcccattaagataaaaattggctgttgattttctgccgctatagttattgtcataagctgagtcttatctcccatttctgctaagaaaaatgcaatggctactgtaacaataggaccaaatcttactttcttgttttcttcatcatctaatttatctccacgtattgtccaaagaacaaaggctagaaaagatactgctgctataatttttactaaatccattggaattacagagtttaagtaacttccaactgcaactgctaatgcatgatttaaaatagttgcaattagcactccaagtaatacttgtttagctttgtatttacttaccattgccattgccagaagctgcgtcttatcacccatttctgcaactaccactaataataatgccttaataaatgatgccattttaatacctccaaattatattatttattaacccaaactctccctctttgtgtactttttcatcaattcaaacttgttttagtttagtttttaattcctagccaaacttgtccaaaagtatattcccagccataaggatcaaatatactaattattaaagaacaaaatcgcaggcgactgtggagccggagattttttcacgcatctgccttttcgaacgcatgtgagaaaaatttggcaggcgaataagatttcttttttattctttttaaaatacaaaaactagtcaataaaccttttttaaattatccacagattttattgtaatataaattcttaaagaataaaaaaataaagaccttcggcacaataacgtgtcctaatataagaatttttaatgagctagatcaaaactcttatatcaaaacacaaatattgcgctaaaagtctcacttaactaaaattagttacgataaagccagacctaaggtcagtatgttgacttcatcacctttttaaaggcagttactccctcttaacttcaaatcaaattttcattaaactaattttacagtaagttccactgactgtcaataaatccatagtataattcactctttcattttataaaagtaattaatatttttagcacatatgtaaccaaggtattctaattcttactaaatttatagaaaataagaattgacaataatgattttcattattaatatatacatataccccctagggtataaaatcaagaaaattatttaaggaggatgctagtatgcgtcaatgtatggatgttccaaaaattcaaaccagaataaaaaagattgaaggccaacttagggctatttcagaaatgataaataaagatgtaccttgtgaagatattttaatacaaattaatgctgcaaaaagtgcattacataaagttggtcaggtagttttagaaggacatttacaacactgtgtccgcgatggtattgaacatggcgatgcagataaaacaattgcagaatttgctaaagcagtagaacatttttcaaggatgggataggtgataaaatgaacaaaataaaatatttttttgaagatgaagataagcgcactatgctatttctagtcttatctgctttcgcattgcttattagttttttacatattgtgagttttaaaattgatatagcttgggtagctattattctatgtggctttcctattataaaaggtgccatcgaaggacttataactgaatttgatattaaagctgacgttttagtttccctcgcacttgttgcgtctgttttaattggtgaaacttttgctgcaggtgaagttgcctttattatgacattaggtgcattattggaggagcgtactgttgctaaagcacgtgaaggtattgaaaaattagtaaatcttactcctccaacagctagagtcattcgtgatagcatggaaaatatcatcccagcagaagaagttaaaatttctgatattctccgtgtgcttcctggcgaaactattgctgttgatggtcttattatttctggacaaacatccattaatcaagctgtaatgacaggtgaatctctacccgttgacaaaggtgtaggtgatgaagtgtttagcggaacagttaaccaatttggtgcatttgatatgaaagcaacaaaagttgatgaagatagttccctaaaaagaatgatcaaacttgttgaatctgctgatgcaagcaaagctaaaattgttggaatggcagataaatgggctacctggatagttgtaattgccctagtatcagcggctggtacttggtttgttaccggagaaattattcgtgctgttactatacttgttgtattttgtccttgtgctttagttcttgcaactcctacagctattatggctggtataggaaacgcaacaaagcatggtatccttgtacgtgaaggtgacgcacttgaaagattagcaaaagtaaagagaattgcattcgataaaactggtacgttaacatatggcaagcctgctgttgtggcaattgaaagttttaatgaaaatatcagtacagaaaaactattggcgctaacagcttctgctgaacttcgttctgagcatccattaggtaaatctattctttcacattttaaggctgcatcaaactctaatcctgaagatcctgataagtttgagcttattgcaggtcgtggtgttaaatcaatagttacaggtaacaccattcttgctgggaatactgaactattaactaaaaattctattgaaatatctaaaaaaatattagataaggcatcaacttttattagagaaggatgtacagtcatctatgtagctgtcaactcacaaacctctggttttatagttttatcggatacattacgtaaggattctaaatccatgattgaaaaactgaaatcaatcaatgtagaaagtatcttattaactggtgacaatccccaagctgcttctcatattgcgaaaagcgttggcattaataatattcattctgagtgtttacctgaagataaattgtctgcaatcgaagaatatcagaataataatgagatgatatgcatgattggagatggaattaatgatgctccagcactaaaaaaagcatatgtaggtattgcaatgggcggtattggaagtgatatagctgttgatgccgcagatattgctcttgttagtgatgatataaaatctattccgcatttactcagtctatcacaaaagactatgaatacaattaaatggaatttatctctttctatgttgctaaactttatagctataatactcgcaatagcaggtatcttaaatccaatacttggagcactagttcataacttaggctcagttgcagttattataaattcagcattactattaaacttcaaaagtgaatagactctttatatattatttcagtatttttttctatatttattcttcggcatagcacaagtgaattaatatctatacaagtgagttctacacacttataccaccttataaagtcaaataagccgaagttaaagtaataatttcgacttatttgactttttaccaaatcacagaattgtagtacttattattatgtaaaagaacaacttatatgtaatttttctttcacaaaatagtgctgttatctaatactactaatctccagttttacttgtccgtattatttaatgaaaaagcagaactattattaaaattacaatgttctttcaaatgctattcttttatttccatcttctaaatagattactccacgatattgaaatttgtttttctttagcaacctttgcatagatatattttcttcatgtgtatctatttttatgctatgtacccctttacttaaacaaagttcttccacatttttaataattttagatgataagcctagtcctttataagtgttatctacagctatcctatgaataactgcatattcattattagtaatccattcaccttcataaatagaattatatgttttttctccgtcaaaagaaaccgctgctgtagcaacaatattattgtcttttaataaaatatagctatgtttattagcaatgtcatttcttattgtttcaggattaggataattattctgccattgatcaattccttgttctttaaaataagcttgtgcctgcttaataatgttcattatatcatctatatctgtttcaactgcttttctaaattccatttctattctcctttatacaacaaaattcatttgtattcaataagcacaaaaatatatactaaaattaagtttcttctcttcatcaaaatcattaaagcttacctaaatttacaatatttgaactttcaattatcattagtgtatcctaattcacttcaaagctcaattatattttcatataaacttgctaaagcctggactattcttgtgtaatactcaccatcataaaatcgtacgataaaaaataagcgtaaatactacccaaaatcatttagtaatatttgcacttagataataccaaagtatattaaattattgcttattagcacatattataatttatttatttgactttattttgaattttaaaatactatctcaacttaaaatatttgtgtgaatttaaaaagctatagaataattttttaaattcatacttcttactatttaggtttaaatccgtaatttttgtaaagttgcatcccttatagtatagagcttttactatttggtgaagcggtgaattttccaagtaaatattcattggatatttactaataccacttttaagggttatatattcaaaatcaatatatggatgataaaataaactagctagtgtagcttcgcctaagttatttactctattaatcattttatcaataccgtctttttcttctacatatcctaatggtgtaggtatatacaaagttctataatttctaggacttttaactattctatctccccaaatgcctacaaatggttcataaataatatcaaaatattgttcaaatatgctttgttgaaacgcagtggctgcatagtgaggtgtctcaaaaaacttaacaggtaattctaatttctttgcagtgttaatagccgcttcaactctttttcttatacttttttcatcattatttctttcatcactaaactcagtaccaactgcgctaacttcatcaccatactggtgagtatagccatgtagaccaattattccatttctgtttaataaatactccattgtaaatagaaagttagcattaggcatactataatcttttgatatatcattgtcaatcccatttttgtgatcaacaaatcttggtatccatgctatatggaatggtataccagctgaaaacatataatctgcaactactctaagcttttctagattatcagaatctaaatatttcccccctgctgttatgtcttcaaatcgaattaaactaactcttccataaacattttcgcaattcctataattaattttatcccaataaagtgaaatagtgctcctactataatcccacttagatcttatgcttaatattctgcacatgtcaaataacgatatatacaatacactattaattacagtaaatttataatcactaatgcaataatctatacatatagatgacttctccttaaactttatatctattttactcccattaatattaattttgcctcccgtctggttaacaaattctaaaatgggcataaaatagcgattaatatttttatatatagaaatattaatctttattgatttgccttcaaaatttatcttcagatcatcttcaactaaaaatattcttttatcacaaagcatttttcttcacttattacaatattgctccacaaatataaagtatgtttacaaactcataatgccacttatacaatcttttaaagataatataaaaagaatatattttttctagattcacataataaatttaacatatttaaattttataacattaaactgacgaaaggggttctttagttgaagagatttatttcaatattttctatttttttgcttctgtcatttactattaatactgctgcagtagctgatataaatcaaccacgaacttttaaagaaggattttataacatacgagatctaggacttatggaaaatgtatcttataacgttcaaaatttatctgaatatagaggatttatggttgtatttgattctgaacagaaaatacaacaagctatttccttagatccacgctctcaaaagtttccacttaaacccattcgaaatagtgatagaattgtaatattgggtcaaggcgcgttaactttttcttaaataaaattacatttctcaattatcgtttataattaagagtatattttctttaaatactgtacataattaaaatgcaatttcatagaacaaaaaagagatagctttattattatctacctagtttaaatgctatctctatttctttttattttttagttccaaattattatcttaaatatactcaaagttcaataatcatatcattcatctcatcagattgtgttattatcctgcttaaatagttatcaattctaactttatcagaagctatcattcctaattgaactaatcctctaattactgataatgattttttaaaatcatgaacggctgttgtaattaattcacttattgattttaaattaacttaaaatattatgggaatatatatttaatagaaataaaattctattgacattaatttattaaaatgttaatctggttttgttcaatttaatcatgttatatattattttaatcaattttaatatggaggttcgttatgagtttaattggtctaactaaaggtacagatttagaagaaaaaattaatgaaatgtggaaagcagaagcaataggtgctgcaacttatcaagcttttgcaatagtcgctcaggaaaaaggtctacctgaattagcagatgaactaaaaaagatttctgctgatgaggctcgtcatggcggattatatgcatcactaaatggccatacaaacaaaaatttacgtgatgctttgagttcaatgtctattggggaaatctctgcaggagaaaaaataaaagaattatctaatattcttgataaattaggtcttaaagaagcagctcaagctgtacatactgctggcgaagatgagtgtagacatggtgagattttaaaagagttgattgaaaaatatttatagtggatgaactaatataaatctaacctataattaatttatctataataagctctataaaaatataagtttaattcaaaatgcaaaaaatataataacactaaacttgagattttgatttgaagcttaagtttagtgttattgcacacaattattttttaatttttataactcatctctaacaagtctttttgatctcatccttctatcaattccttttttctgaaattcatatgaattaggcttttccttaatgactatctaaaattcttaaaaattatttcaaaaatcttattcttattattcatatctacaattatagtcttatatagttttcgcactgaaaatttaaagtttcaagttaatgcttattatttttattaagtcactttaatctttctaaagtttaactacaagcatgattataaattttattccatatgcacaggttcgaataaattttataaataaagaaagcctatgagtatatagttaaattaaaacatatggaggattaaaatgaatttattaaaaaaatcgaaattgattattatagttattctattattatcaaatataattccatataatacatatgctttacaaaacactaccgctcaacctcaactcaaagtagctgtatttataaataatttcgaagatttatttctttatgaagtaaagaaaaatttagaagatattcaaattgaaaatgcaggtaaagttgaatttaccttttttgatgcaaaagaaaatcaaagtattcaaaatgagagcattgaaaatgcacttaatgaggattttaacctttttgtaatacgtcctgttagtaaaagcctaaacgatattgaaggtacttttaataaaatacaacaaaagaatattccattaattatcttatacgaaaaaactccaccgatagtaaacttacttagaccttaccgcaatagatctataatccttaatacagatcttgctcaatctggtattcttgaaggtaaaattctagccaatgcttggaatgcaaataaagatgctctagataaaaataaagataatataatgcaatatattctcataaaaggtccatctgatagcaatataacagctctaagaaacaaatattcaattcaggcaataaatgaatctggaataaaaactcaggaaatttcatcagtcacctgtgattttctagaggaatgcgcaagaacttctgtagcgtcgctgtttttaaattacagtaataaaattgaagccataatagctaatagtgattccatggcaataggtgctgttaagggacttcaaaaatatggatacaataaaggagattcctctaagtatattccagttgttggagttgatgccttaccagaggcacaagaactaattgcaaaaggatttatgacaggtactgttaagcaagatccacgcgaacatgcaaatgcaatttattctataggaatgaatttagtttctggtgctcctcctctcagcggtactaattataaatttgatgaaactggagtcgcaattgagctgccttattctgaatatgttaaataataataagttccttaattgtaaatttatacatctttatcatttatgcatatacttgttctaaaataatatttttataagtcccttatctttaggggcttatttttcaattacttttaccaattcataatgctctatttcaacaataagaaatgagctctatgattattagctaattcctttttattagtttgcaataaaaaatattttaattaaaaaactttataaatcattactctcgaaattaaatgatatttgcgtaacctttccacattcagtaaatcccacatttttatatgctttattagaagcaggatttcttaaatctgtataaagaactggagttctatgttcactaagaataattttacataattcagatacaatttttgctccaaatcccttacctctcatatctggtatggtatataccccattaattctaacatttcgctgtgaacggtgagcgatacttgccatagaaattgttttactatcacattcccaaatatataaattcttactttcaatatacatttttgcagtttgtaaatgttcttctgacgtagtttccttaccaaagcaatcatagacaaatccagataaaaattctgaaataatagtaatatcatttatcgtagcttgtctaaggtgtcccttaatctgctttgcttcaattacagatggacactgaaatgattccatttgcaaagaaatagaataatttttatgcttaactttagaataatgttcagctaacaagattgctatatctggcttagctacaaacgtcagcatgcctacatctttatataattcagtaaaatcattttttaattcatcaatatcattctttgtaacattattgtctgtccatatccaagctggatatttaagcgccgactgtccaattattatacttctattcttatttgtgaacaaatatggagattcactttctcttactagatgtagtaaattaaactgaacttcgtcatcagtaaatggtttagaatccaatatgctatcatttccttgaaatcttattaacattaatatacccccatagaaatcttataaatttctgcctaattttaattattgataatatatattgcaaaaataattcttcatcataattctaaaaatattacaagaattctctccgtaattgtgaattttgaaatgtgtattgtgaattgcaacatatatattacgtataatatttttctaatttaatactatctgctaattagcaaatcaatatggacactgataaaattttactagtacacactagcttgtaactcgttaataaacttatctaaaaagatatttactttatttttgtctgactgagttccatataaattaacgctaagtgttgccacattgtcaaatgttgatatagctaactgaaaatatggattatatttgattgagcctgtcatatacgcttcgacaatatcactattatcaaatgcaagttgtttttcatcaattatccctatgttagtaaaagcaataagtggattcacgaactttttctcaactattcctcttgcagtcttgtagggaaatatatcaaaaactttttctagcatagctacacttttaacacaagctatattagatttctgtttattcatttctttttttactttataaagtgtttcttcaaaagtcctaccagtctcatcgcctatattacagataagatttgtacataaattacagaaaccttctcctctatgatttggaatatattttcttaaatctacagtacaaggtatagttacgcatcttccaaacaattgaaatagaactcgtatataggcagtaagcataatatcattcactgtagactcgcgctctttagcataagctttaagcatatgaaatttctctttattaatattacgaatttcgataaatggattattaatgtccccttctaactcaaatttcacatcattatacgtgaatatatcaactttaccaaacattatttttactttctctgtaattgataaattcttaagaatttgattaactttacgattttttcttgtcatagcttgatagtcttgattattttttatatttgaataaatattactaagcatatatagatattctttaaaccctgcggcatcacacaacatatgactcattaatatacataatttatccttttccttcactctaattaatttaatccttaattgtggaccattaaatgcatctatttgttgataaagatattttttgatacattcttcttttccattttgtatttctataaattcaattatatcacttacagtataacccgcttcttcccaacagggctgtcttttggattcattatatctacatctaatcaaagggaaaacattaatagaaatgtcaatagccttacgcaatcgttctaaatcaagctttccagagaactttgctatgaaatgaagagtatggtcattgatctttttaactttaaaaagatattgcagaatatcccatgcctctgctttataatttttataataattatttagcattttacacctctatcataaaatatactcagtattattttaccatttatatataattataacatgcttgctcaatgatatattatctaatttttattgcactttttattttataatcttagaataaattttatatttataccaaacctaatgatgagtattatgatttaaaacagttacatgagttggaggattatttgatgaagacatttcaaaaaataatagtattcattcaaattgtgttaattatattcatactaataaatatatctcaagttaatacatttgctagttcaagtttaaatgttagcaatagtaaagtagctaatgttgcagtattactatatagttttgatgatccctatatgttagaaattaaaaagagtttggagaatattgaaaatcaaaataaagataaagtccactttactttttatgatggaaaaaataatatggctgtacaaaacgaaacaatagattctcttcgcaagagtagtattgatttatttatattgaaactagctgatacaaaagaagaaaccataaaaaacatcatgcttaatctaaaaaatgttccaattatttttatggaagttattcccgaagttgtatcaaaagtttccaaactttacagtaaagctgtttttctgtattcaacttcaagccacgaaggtgttttgcaaggtaaaattcttgtagataaatggaatactgataagaaatttttagacaagaataatgataatattttgcaatacattttgctaaaaggtgaagctaataacccatatgctattgaaagaacaaatgatgttatttcaacaattaatggagccgggatacaaacagaacagcttgctctagtaaatgccaattggtttagagaattagctaaaacttcagttgataatctatttctcaaatatgatggtagaattgaagcaataattgctaataatgatgcaatggctttaggcgctattgaagcactacaaaaatatggatataacaaagggaacaaaaataagaatatagccgttgttggaattgatggtctggaagaagccaaaaatttaatagacaaaggattaatgactggcacccttattcaagatacgaaaatggtagctgaagccttttataatattggaatgaatttaattaacaatgaaccccctatagcaaatacaccttacaaactagataatggagtaattacgattccagagtcttataagccatatacaggtccagttattagctcataaacagtctaaagaatttaaaaatagcgagtatactttataagtagactcactattttcttaacttaaatacgttgcctaaacagcattctacgaactactatatataaaacttaccattagatttaaaattcattttttcctatctcttttgcttatagcaaccaaagcacatgcaatagcagcacctactgcaattaaaatagaattactcattaaaatactccttcaaactcctatttataattgactataacatatttaaaaatatatcacgatttactcatcgaaatcaatgttttcattaatcgctgattaaattataaatcgaatgtcattatttctctttcataaatattatataaatcttaagataacattctttaatttattcatatcaaatggtttagaaatatagtcatccattccaacctcgatacatctttctctatctccattcatagaataagctgtcatagctattatattaacatgttcctttgtctttatttctttttctctaattattctagtggtatcatatccatttaattctggcatttgaatatccatgagtattaaatcaaatgtattttcttttagcttttctaacgcctgcttcccatcatatacatactcatattcatatcccaatctatttagcatttcacaagttatcttaatatttatttcgttatcctcaactaataatatccttttatttttgcttgagactatctcatcatctcctgcatttaaattatcattatttatattttctgcataattcactaaaaattctgctgtaaaataaaaggtgcttcctttattttcaatactttcaaaccatatgtccccattcattagctttgcaatatcttttgaaatagcaagtcctagccccgttccatcatattttttagtgtaagtcatatcttgttggataaattttttaaagatatcatttttaaattcttctttaatcccaatacctgtatccttcactgaaaattctaatgttagcttattatttgtagtatttaatttccttaccttaaacattatttgacccatttcagtgaatttaatagcattattaataatatttataagtacttgatttaatctaatttcatctcctattaaatcaaagtttatatatggatcaatatagtaaaatacttctaagttttttttactgcatgctatagataactctttagtaatcctatctagagtttttttcatattaaacggctttaatataagttcaaatttccctgactctattttagaaatatctaaaatggtatttaatattcctagtaacaatcttgatgaattactgagcatgtctaaatattctttttgattattattaagttcagttaccttcaataagtctataattcctattattccattcataggagttcttatttcatggctaatatttgcaagaaattcacttttagctttgtttgctttatccgcttcttcctttgctttttctaattcctgataattacttcttagctcttcttctattgctataagttcttcatatagagctgatatctcttcatatttatctcttaactctttttccacctttttattttctgttatatctctagtgatattagatgctccaattaaatttccttcaaagtcgtaaataggtgaaactgttattgaaacatcaattaactgaccatttttctttcttctcttagattcgaatcccctaactctttctccattttttatctttttaattatttcataaaaatcattaattttctcatcaggaattatgatagatatgtgctttccaatcacctcttcttttttgtatccatagatattttcagcacctatattccaacttgttataattccatctaaagtttttcctataattgcatcctcagtattttcaactaaagaagctaatcccctaatttctgcttcacttttcattcggtttgatatatctcttattatacttaaaacaaatctatcattactaatttctattcctattgatttgacttctactggaaaactagtaccatcacttttaaagtgaatagtttcaaactcaacatcacccgatttagctttttcaaactgcatgattgcaagttcgattctttctctatttcttaattcaaatatattcttagaaagtagttctgcttcagtatagccataagtatccactgcctttctattaacttccaatatattaccttgacttgaaaacaaaattattatgtcattagcattacgtatagcagcttcatatatttgcaaataattatacttttttttattaatattttcattggtttcactactcatctatcacccctccttaaattccgtaaattaaataacaaacgaataagatagcataaaatataattgtcgttagtatagcataagcaggcctaatagttcatttaatcattttttagcattttctcaagttcctcttcacaaactggtttactgaaataatatccctgaattatattacatcctaaattcattaattcattaagttgctctttaacttcaaccccttctgctataaccttatactttaaacttttcgataagctcaaaatacactctattactgctctgttcttatcattcctaatattatcgataaaagatttatctattttcaaagtatttataggtaggattgttaaataacttagagatgaatatccagttccaaagtcatcaattgaaatatttatacctttttttattagttcatgtaaatcagcaattttctcatcatctaattcaattaaagtactttcggttatttctatttcaattaaacttagaggaattttgttttcttcacaagtttttattattttgtctttaaaatctctttcttttatttgaacaggtgaaacatttatacaaatattattaaattcatatttcctctccttaagctctctaattttacggcatgctttctcaaatacccaatctcctatatctacaattattccaatcctttcagctattggtataaattcagctggagatacaaaaccgagctttttactattccatctcaataacgcttcaaatgcaactaccttattatctaatgcatcaatttgcggttgatacacaatggaaaattcatttttcttaattgcttcttttaattcattttcaattattattcttcttgtatataacctacttagagcttgttcgaaaaaggtgtatgtgttttttccatctgctttagacttatacattgctagatctgcaaattttagtagatcattcatattattgctgtctcttgggaaaattgatattcccatgcttgttgtaatatacagatggttttcattaagttcgaatggattcttgcaatattttaaaattgtattacacatatcttttactttttctatagaattaactttttctataattacaataaactcatcaccgccgactctgtacaacttcccatagtcctttatacacacatgtaataattgtgagaatacttttaacataagatcaccatagtcgtgtcctaaggtatcattaatcgatttaaaattatctaggtctatgaaaattatggctccttcctgactcagttgaatatttttatctaagatattttttatatccattagaaacatatccctatttggaaggtttgtaagagaatcatgatacaaattatctgcaattcctttttctctttccttttcttcagttatatcatttaccaatccaaatatacgagttacaccttcatctttctcttttatgccatttcctttaaacaatacccacttcaatttattatctttagtaataattctaaactcgctcacatataaggtcactttatctgcaacaaaaaaatttaaatcagtcaatgcatcctctctatctttacttatagctactttttcaatacaatcaattaaactgctaaaatcttttgagttataaccagtaatttcttcccatgcatcagaaataaagaaactgtcctcctttatattccattcccaaactgctatatttgcttcatctattgcttgtttatatttttttaatatttcttcataatccaaatcacttttttctatctccataacagatttctttgctctccttaaaaataagttcatttgattatctttcatgattataaccttctttatggttgttcaattctttcatatactctactatcagatcatctaaatgctggcttatagttaatccattatctatatctacgtttccatcaagtgtgcagcaaacttcattcaaaatttctcttacagcacttatattttgatttaactctgataatttgattgttttttctttaatattcgttgaatcaaattcatacatactttcttgatttacaattgtcctatttcttccactagctttagctttatagagattcttatctacttttgataataaatcataaatattcacatcttcatcagaagcttcgtacacgccaaaacttgctgttatttttatctcaataccatcataattgaaagatgtattttctaatacttttcgtatcttctcggcaactttatacgcatttttagcctcagtataatttaatattataataaattcttctccaccaaatctacctacccaatctgacttacctcggaccgatttcaatattagatctgaaaaatcaatcagtattttatcccctataatgtgaccatattgatcatttacttttttaaagaaatctatatctgccataattatcgataaaggcattttactaattttcatgtagttaatatctacggggagtctctcatttatataccttctattatataatcctgtcaattcatctttaattaccttttcattcattgagataattaattcttccacaaagtcagaatcctcagtcatcttatgaaatacgcttccgatattggtaatatcctttaatatttccacaatatatatcctgccatttaattctactggtgttgctgtgattaagacaattttttctttatcatactctatttttacaaatgtatcattgttgttatatgctcgcatagaaatacagttttcacaaaatgtatgtttcttccacaacaaatagcatgtgccatttagcccttgtagctcattgtccttaacaagagccgcttttttatttattggatccactattcttataacatcatataattttttaaaaatagatagcctttcttttacttggtctattacttccataagattccctcccttttaaattcaaaatcctctcaattcccataaaacttgcttattaaattcatatgtacttcttaaaacctcttttagaattgttcttcttgttacattaattcaaaaaatatatcccatagctttgaaacaactttatcgtttattcttatatttgatgttatcatttcataaagtaaataatcctcaagctttttacatttaatcaaataactatttatatttttagttataaatttatcattatattgaggattacccatgatatcaagaatgattttgttttcttcagctatatagaatttatatttttctcgtattacatttgctatctcttctggtggaaacatgtggcatctaagaataaactttctcttggatatatctgatacatagtactctatcttcttttttaatagagtatacagcttttccttaagagggatattcttgtccattgtctcaatactctccatgtaatcaatataatctttataaatataatcataaatatagaaaaacagatcctgctttgacttatagtaaaaatatattgttgatgctttaactccaacttccttgcaaatatctctaatattagtagcctcatatccgttctccagaaaaagtctaaaagaagtataaaatattttatctcttgttgaattttccaaaatacttacctccatttacaaatttactgaaagttttttaataactttgttattattctcataaattacaaaattatatatataacgttcgttacataaatcatatcattgtatttttccccattcaatttattttgtactctatttttactcataattcgactcattttgaatgaaaactatttctttaggaatgtaatcatatcactattcaaatacatatatctaacaattatattttctttatagatctcaaccttcttaattaattttttccttgatttattcacggcccagattaaatataaatttataaagaataaaaaaagcagcaccaattattagtgctgccttataagcctctatgttcttaagttgaattctataatatttaacaaattttcaatttcaaatggtttagatatgtaatcatccatttttgcctttatgcatttttctttatcttcccgcatagcatatgcagttattgcaattattggtatatgtttcccttctaattcttcaactcttatagcctgtgttgtttcaaaaccatttagttctggcatctgtatatccattaatattaaatcgactttattgttttttaatatatttatagcctcatttccattatatgctgaaatatatttatacccgttactcctaattatgttttccattacttcttggcttattaagttatcttcaacatataagataactttatcctctcgatcattatgttgattaagcttatcactttcaatgttttttctttccataacttgttttttatcatttgtttttttaaattcacatgtaaaaataaatgttgagcccttaccaaaagagctttcaaaacttatttctccattcatcaaattagcaaactgttttgaaattgataaccccaatcctgttcccatatactttttcattgatgatatatttccttgagtaaaattattaaatatcttatctttgaactcatcatctataccaatccctgagtctttgatcgtaaattggattttttcactatcactatcttctgaaatcatacttactctaaatgatatatatccgtcatctgtaaactttactgcattgctaattagattggataatatctcttttaacctcagctcatcaccgataatttcaaaatctatgttatggtctaaataataacttacttctaatcccttagaatttccagtgactaaaaggctattataaatattatttatagtctcttttaaattaaacggttccctattaattctaaatgtacctgactctatttttgacatatctaataagttattaataagtctaagcacagtatttgctgaatcatttaatattctaatatattttttttgcttttcattaatatcttctaactttaataactgtatagccgccgtaattccattcattggagttcttatttcatggcttatattagccaaaaaaattgatttcgctttattggcttcttctgctttctgttttaacaattctaattgttcacacttttctcgcagatccttttctattagtttcctgtctgtaatatctttatacattgctactactccgaaaaagagattattatcatcataaatcggagatgctgacattaagacattaaccaggtttccctccttgtctattctgacagtttcataatctttaattacatttcctttggtaatcatatctattaatttttgtgattcatttaatttatcttttggaattagccgtctcatatcatttcctattatgtccgcttccttaaatccaaactttgtctcagcacctttactccaacgagatatgttcatttctttgtcaaaaatcacaaatggatcatcaagtatatctaaagatattgaaaatatctttgaatctttaaataacctttccatatccgaaatatctcttataatactgactgccacatctcttgatttcttattactacaaacggatcttacttcaaccggaaatcttgtcccatcttttttgtgatgataacttttaaactttattcccctatctaaagctttatttaattgatcttgggtgaattccctgctatcctcatttctaagggtaaagatatttaaatttacaagttcatcaaaagaatacccgtacatttcaatagcctttttatttccataaagtatttccccacttctgcttactacaagaatactctctaatgcattatctataaaatctcttccttctataaacaacttttcatttgataatatgcctttactttttatgaatgtacaaaatatatacttttcagcaaatttactgaaactaacttcataaacagtatctctaatgactaatgtataaatattgttatcaattctttttaaataactaaataaatactctcttaaatatattttaatttcatcaacacagttatgggttaagttttcacagtcaaattcctttctgaaactttcatttataaatttaacactgaaatcataaataacttgatttgaatcagttaatggttcgtatatagatattatgttattaatattatttaaatatgatattccctctaatactgagctaaccataatttacaccatccccttattatttttataacacactctttcattctcataaatagatttcgaagatattataaatttcttcaacattaaatggttttgatatgcaatgatcaattcctagattcataagtatctctctattttccataatggtatatgaagacattccgattataggaatattttttccttttactcttgatattctcatttccttaattttttcaaaatcttctaatttatttaatttcatatctagcaatattaagtctacatagttacaatttaggattttcaaggcctcgcttatattatgcgcatggatatatttgcagccttttctctccactatactctccataacttctttatcaattgaattagtttcaatgcaaagtatgactttattcatccataaattatttatattatcatcttcgctaattttattatcgttcattacctctatattcttttcataataatcactttttttaaaactacatgtaaacgtaaatgtagacccttctcctagtgtgctttcaaagcttatattcccattcatcatcatagcaagttgcttagatatagataatcctagaccagttcctgtatattttttatttacagatatatcaccttgactaaatatgccaaaaattttactcttaaatctttcgtctattcctatccccgtatctgctattgtaaatttaatttttacatagtcattatctgacgatacttttgttaccctaaaggatatatatcctttttcagtaaattttaccgcattactaattaaattatctaatatttgttttaactttagttcatctccaattgctataaattctgcatttgggtcaaaataatatcttatctctaatcctttagaatttcctgattccaagagatttgtataaatatcatctgttatctttttcaaagcaaatttaccatcatttaatttatgtataccggcctctatttttgaaatatctaaaatattatttataattgttaatagtttatttccagagttttttagcagtgttatatacttactttgctcctcactcataggtgttttttcaagaagctgaattgttccaaaaatgccattcatcggagtccgtatttcatggctcatattgtctaagaataacgactttattttattagcaatttcagcttcttcctttaatacttccaattgcctatatttttcaacaatgattttttctttttcagctagatctgtaatatcatgataacaagctaaagccataattaaatttccacttgtgtcatatataggagtagaatttactctaatagttagttctttatctgaacgcttaattatgattgttctattttttattttttcgcctcgtaatgcgcattttaaagacaaattctctacatggatttcattccctgatgtatcaaaagcttgcttagttatgttaaaatcatctgcattctttacagcataataatcagaaagaagacctcttccttctgcattcatcaaaattattttaccttccttatctgcaatataaattgcatcagaaatattttcaatgacagcttctaattgctttttttgcatctttataattgtattactattaacctgttcagtaacatttcgggtgcacaatagcgcctttactatatctccatcttcatcatatagaggactgccacttacattaaagtgatattctaatccctttctcttaagcgtcattctatattcattaatcttttcaccttttagtactcgatagctaggcaaattttctggtttgattatattatcattggaatcgtagaatttcacttttaagaaattttcactgattttgtttgctaaatcaatattataaaaaaagtcttttgcactggaatttagaatattaatattaccttctttgtcaattgtaaacaatccctcggacatatttctaattatagcttctaatttattcttttgctcttctataatttttgcttgtaccttttccgttatatcgtcaattattaaaacatatctttcaaaatttccttttctatcaaatataggcttgccactaataacaacatgtttctctaaatttctagttcctattatcactctataattatttatttcctttcctttttctatataactaaacttactctcttcaaattcaattttatttttatttacatcaaaaattattatttcatcttttatatcatttatattgcttattttatttgcttgaaataattccaaaataactttgcttattttaattaaccttccacttttatcaaagatgcttatctgctcatctgctaaatccattattgcctcgatttttttatcccttctctcaatttcagcagcttgagctttaataaccattttatttcttattctatctgttacatcaatacgattctcaatataatattttactttcccatcttcatatattggtactattgctgaatcaaaatatgttgctcccgttccatgtctatcactcataaaatcttttacatagcccgtcttacctgtttttataacacttatccatttttcccttattttatcttccttaaaatctttagctatttcttctattgatttaccaatgcaattctctttcctattaaatggttcatccatataataaatgtatttttcattagcttttaataaagttaaatctggcgctgaataaattccaatcccatatctattatccaaacataactgttctgcatataaaaatttattttcaatacgggaattctctttttcatagaagaaatataatatattcattttctcgtgatctatcttcttagaaataatcacttctcttggctcaagtgacttagtgaatatgtagatatctatttcatcactaacacttccaaattcatcacaaaaatcagatttcaatattttactcagttctttatatgatcttcctaatagttcctctttgtaataccctgttaaatcaacaaattcttcgcttactttaattactatcttatttgaaatagtaatagatgcttcttgatttcttttactattaagtggcattgattcttcctccgtaaatataaactcttataacatgtatggaatttccataatgcatataaaatataaattcttcaaatagaatacatttaatttattatatcatctatactattattaataaaataataaacagaagtctttgatatattaataactttaaaatcacaaaaaagccagtagaacaattaattatataaatagttctactagcttttcgtaatcttattaaatttctaaagagttattttcacgaccttagtcttatagttattacttaagaccttgttcgtaatcttgaatcatatgttttaccatataaccgccaacatatccattttgtcttgaagaaaggcttcctttatcgatgttttcataatcacttaatccaacttctgaagcaacctcagtttttaatctgtttaatcctgcctttgcttctggtactaatgttctatttcttccactgttatttgatgacatatacatcaacctcccttaattaatataaattttgtttggcattaatatattaaccattatgacaaattataatctattaaaatactagcaaaaatagtactgatagcttgtattaaatatttttccctattgaagaattatattgatatttataacttagacttatgcaataatccaccgaaatcataaatattttgattccgaaaagctataaaaatatcgctaaaatgctaaattgcaggttgcaccactaatgcttgctcccattttcattgtgacaagcattagtgtaacaatctacaatatatatccaatatatataacaaaatccataaataaggttctcctattaacatatttatatatatatgctaacataatatacgttgtagtattaaatactttaatacaatatacttttgagacacgacaatatttgaggcataataatggaattaaaacataaaacaaatacctataaaactttatttcattgacatagttttagattaagacttgttgttgaaggtattgggataggtattactgctggcctattgattgaaaaacaattaatttccaaatctttatttagacgaaattcttacttatttaaatattttgttttctgccttattaactaaatacttgaaccaataagtgtatgcttctggcctttctataatatccttcttaacctcattaatatcaacccacttaaaatcatctacttcatctttgtttacaattatttctccatcatatttcccaatgaatacatgatcatattcattttcaaaaagattatcttcaagttttactttataaataaaactaaatacttcttcaagttcacatgtaaaacccatttcttccttaagccttctataaatcgcatcatgtaaactttcaccgtatcttggatgactacagcacgtatttgtccagagaccaggcgaatgatatttttttacatttcttttctgtaataacaattgatttttagaattaaatactaatatagaaaaagctctatgtaatgttcctttacggtgagcctccattttttcaattgaacctatttcgttatcaaattcatctacagctattatatattctgccatttaatttcccctttcatttagactactattatcaaaacttacatcattaaaataattgtattcgccacataagtaaaaaagcatcttccattaatcaatatattaatttactatactaagctaacactattatcttcatttattaattttttatagccttttccccagtcacacattgcacttaaaataggcgtcatgctttctccaatgcttgtaagtccatattctacccttggtggtgattctggataaacttctctgtaaattattccatctctttctaattctcttaactgcattgtcagtgttttctgagtaatattagttaataaccgttgtaattcattgaatctaatagttcctcttgacaaatgccaaagaattgctattttccatttcccgctaagtatatttatagttaaattcatagggcaattcgattctaaatcaattgattttgacattaatttattctcctaacacatttttgtaacaatctatcttctatttaattaccttaatggtatcatttttgatatcacatatcaaatttgtgcgtacttttatgataattctattcatgctattattttataaaaccaataaggaaggaagatattatatgaatgaagttttgaaagctataagaaataggagaagtgtaagaacatatttacctacacaaataaaacaagaagatttagatctaatcattgaatctgggatatatgcaccttccggtcataatgatcagccatggcattttactgttattcaaaataaagaaatattaaaacatatcaatgataaatcaaaagagttaatggctcaatcagaaatcagttggatcaaaaatatgggatcaaaccccaaagtaaatttaatatacgatactccaaccttaataattgtatctggtaataaaaatgcactttcccctaaagttgattgctccgcagcgatacaaaatatgcttttagcagcagaaagcttaaacattggctctgtttggattggcctcataacgtttttcttaaaattagaagatgaagctaaaaaactcggtattccagaaggatatgaagcctattatggtgttgctctaggatataaatcattaaacaaagaattaattgctcctaagagaaaattaaatgtagtgaattatatacgataatggttaaatgattccataaatatctgtaactatagataactcaactaatacctgaacttatgcatataactcaccgaaatgaataacatacttttgttccagtttctaggcaattatgatgggtgattctaaggctataaagttgcacccaaagtgctagcctcaaagaacaagcgctcacagagaaagttcgaagaacgaaatataaaatttcgattctcactttttgaactagcacatttggaacaacttatagccaaagaatcacatccatcaaaattaccaatgaaacattccacaaaagtatattactcatttatgattgcgttatctatatatttttacataaaaacccatgctagaaataatccctaatatagtctgttattattcagagaaatctattatttcttcaaatattatctttcgcaatattcttaatcataacatattttgtaaatcttctattcttcgattattgaactatgaatattttatctattccattcactctaaataacatatattctatgtgccaattaatttcttgatctcacttaacaaaacaggaaatttagtatacccatcacgcgcgataaaatgctttcctgattcaagaataataagatttgcgtctaactcttctgctagtttttgcgttgcctctgttggcacaatatcatcgtctattgcagtaatagctattctctttggaattagactttttattcttgcaatatcaagtggactatctacaaattcttgaataccttctgtttgttccttcataggatttttatttatgaacccggagacaagtattgcaccttttatttttatgtttttctctagaatatagcgtagtgctgtaatacatccaaggctgtgaccaattaatatcgtattttcatcaatatccataatacatttatgaagatgtttacgccaaggttcaagatgtggatctcctgaatcaggcatatccggaacattaaccttaatagagctatctttaagctgttctttcaaccatggaaaccactctgatttactggaagatgtataaccatggataacatatatattagtggatttcattttataatttctccttgtaaaaaatatttacaccttatttaattcattcttctaatagtttcatcaatcgaaatatattctgcatatcttccattccatataaattcattgtagtattcatatgtttgttctcctgacatgaatttattgtcaacagttgtgtttgcataagcagggactatcatattgaagccatgctcaaatccacattttatagtggcgtcaacacataaatctgtttgaattcctacaattattatatctttttcgtctttatccattaaatattctagtaagcctgtccctttaaacgcgctgtttacttttttatcaaatatcttttcgtcattaactggtcgaaatttttcatatacttcaaatccgtcagttccttttgttaattcactttcaggaccatcatcatgacgtatatatattattttaatatcgtttttccttgcttcactaattattttctctacattcgatacaaatgcattaaagttatataatttatcatttgttattaatttttgtgtatctacaactaataaaaccatttttattctccttttataagtaactattttcctttattccaattgtaaaaatcttttagatcttctttacgtttcgttgataactctgttttcttaataccatgaattgcaccttctagtgccagcaatctatggatacatgcagaaggatcaatttcttgtatcttaagccatgcctgttctgctccaattgcttttaattcatcataagtaaatatccctacttgattcaattgcctttccacttctttgccgatattaggtagctttgataattctcccatgataaaacttcctctcaaatctgattgataaaaatcaaatacattttaaagaaacctagataattttttctatttttaagtatatcaaaaagcttaacatatttcatctgattttataaccggcctcgtatattttttgaatctactttttttgaaccatatgagaagaattttgaaatcaaatatattttccattgagatgtaaccatctagttccttctttttcgtaatttatactcgctacaatatccattgatttcacttcaatatagactctttgagaataaaaaaaatattgtacggctacttaaaatagttgtacaatatttctcaattcctttaaacaaatttcaaacattaattattactattaatattagaacacttgtattctagtattttttttaaggcagttccactgctctgatgacatcgtattaattcagcttcatttgtatcattattagataacacgcattgtatcattttatgtgatacagtatttgtaaacaatacaagcaggtcaggctttccaatttgctttttcaaattaccttgcatttgagtaaaaacctttgctttacaattataattcttacatatttttttgtattcacaaaccattcgatcatgaccaccaattataacaatactcatttctatctccacctctcctatctaactatataataatatttttaagtcaatttacttttcggcaactcgccaatatgatttcctttaactattatgttttatctataaatgttaaaaatttttaatttcatcttttttattattacctgatattctattctgagttagtcttaactaactcaatattatatttatatagtgcccctatttcacaataacatgtatgataaaatcatcacaaaaattcaaaacaattacactattggataataaaacagtacgagttagtcttaactaactaatattagtttaatatattctagtaagattgtccagtgcattaattacttttctcatatgcatcacagataaaaagtatcctgtgatgcatatgatatcttaagtccgatgccttttctaaaagcacctttatattttatattcccatcacaatgcttttcatatatgctatttccctctaaatttgatgttaattatgcattatgatatacttacttcattaaaatttaaatttcattacatagattttattgaaagaaggtctttatatggctataaatgaatcagtcgaaaactatttagaaacaattttaattttaagccaaaaatcacatgcagttcgttctattgatgttgctacagagcttaattttaaaaaatccagtgtaagcgttgctatgaaaaatcttcgcgaaaaagaatatatatctataacagatgatggaaatatagttctcactgacgcaggtaaagaaatagcaaatatggtctatgaaaagcacacttttctttctaactggttaaaatctattggtgtagatgagaaagttgctgttgaagatgcctgcagaattgaacatgttataagcaacgagagttttgaagctatgaagaaatatgtaaataaaaatacttaaataatagataaccaaaaagtggagagcccttgctccccactttaataagtttaaattgatttaactaaagctccacaatctttgttgcaacatttttgcaaaactcactgtcatgttctacaaaaagtagtgttggtgaatattcaagcaacaactcttctatctgcatacgagagataacatcaatgaaattaaggggttcatcccaaatatacaagtgagctttttcacaaagactttttgcaatcagtacttttttcttttgcccaccactaaaggatgatatatccttctcaaattgctctcttgaaaaatcgagttttctcaaaattgctttaaaaagactttcatcaatgctgttttcaagagcataatcagtcaaatttcccttaagataagaggtatcctgtgatacgtatgatatttttagtccgctgccttttctaaaagtacctgtatattttatattctcatcacaaataagcttgataatacttgattttccacttccgtttttacctttaagtgaaattcgttcaccttgttcaatgcttaaattgatatctttacaaaccattgtatctccataaaatatcgacacattttcgagttccaaaagcttatttttatgataggcaagctgagagattttcaagctgtccgaactttcaatattttttaaaagtttagatttttcttcaattgaagcttctcgtctattttcaattgatttggaacgcttcatcattttagcagctttatgaccaacatagcctttatcaagcttagagcccgagttagttgttcctttttttgatttttccacttcacttgaccaactactagttcgcttagcagattctgataaacgattaatgtctctcctaagtttttcgttttctgctagctcatatccatcctgtctctttttattttcccaccaacttgagaaatcacctttctgtatttctatattggtcttatttattgagagaacatgatcaatacaattgtctaaaaaggccctatcatgtgaaatcaaaataaatcctttcttttttcttaaataattactaagttttttcctagcttcagcatccaaatgatttgtaggttcatcaataagcaaaaacgaattttccttcaaaaacatagctgctaacaatgccttggtctgctctccttttgataaagtataaaattgtctatatagaatatcatcatctatatctaacatggataattctttcactatttcccaatccattgaatttgggctaatttcctttataacatctattgtaaaattttcttgttcttctacctcatacggaaagtattcaaaatttacgttgtttgatatatttccagtatattcgtattttccaagtaaaagattcaaaaaagtagtctttcctcgtccattccttcccgtaaatcccaatttccaatcagtatcaatttggaaactaacattttcaaaaatagtatcgtaattcccatcataagagaaggtaaggtttgtaacatttattaaagacattcatttgtcctcctttgtaattagtttattattaatctaaaataacaaagtcggaaaattaggcgactgcttctacttcatataaatataaacgtcgcttgaagtatccggctttatatgaagattgtcatgtgttagatttgtatctttattttccatgatacttttcacctccttataattataatttagaaaaaaataagagctgcaagaaattattattcttacagctcataaatatacgtagttcagctaattagtatagcataacataaaagtatatattaagagaaaatagaataactttcttgcatatgtacaacaaaataaacagagtccactcgttcactcccctattatattgcactttaaaaattagcaagaaaatttaatcatcatttcacctcaaatttcaaatttaatgatattgtaccaccatgaataaaaaaaatcaacataagatatttctatgttgattttttataagttcaagaatttctcaaaatataaaatagattctttgctctattattggtttggtattaactaattttttggaaagcagcttttagggattaaccactcaagaaccctcacattataaaaacctctatagcaaaaatttatttactataaaatctaaaatgtagcaattatcttgtcatttttctcacctgtttttttatatattttaatattttcagactatagaacaaaatccgcttagcagactatgtgtttctgcagcctccaaaagttatctacagatttgattataattccctaaagaattaaaaaagagttataagaaaatcttataactcctaaaataatcaaaactatcttctattattttgttgctttctagctcttctacaatcaggacatctaactggttcgttgtcaaatcctttttctttgtagaattcttgttctccagttgtgaaaacaaattcatttccacaatctttacatactaaagttttatcttgcatattcaattcctccttctaaaattaaagattaatatcgattcatataattctctaaaaggagaaatccatactatctataaaaaacctttttctttttcttacaaaatttattataacagcttttattttaaatagcaaccttttatttcattaattgcttaattttttatatctgtaatttatgaatggttaaattataaaaaaagattgtaagataactcttaatataaacatcaaaactagcactttaaacattcataaatctactgtagtatacactacatttcgcttaaagtatagtgtttttatatggaaacagtgcgaaagattaaatttatttatcattgtctaaattctctcaatttgctttttcattttttgaaagaagtgtttcctatttttcatatgctatgcaaaagttacagtccatcaatatcaaccattttttcttcaccactaatcatatctttaattttaacttgtttacttagctcttcatcttcaccaactaatatcactttctgtacccccaatttatttgcatagttaagttttttctttaatttatcatcttcaagatatatttctacatatttttctttattaattaattttatatatatctcggcacaatattcaagtgtattaccaattggtattattaaatattccattgatttttctatcttgtagctattaagaaatcctatttcttttaatacaaaaaataatctcgtaaggccgatggatatacctactccaggtaatactttatctgtgtaattttgtgctaagttatcatatcttccacctgaacatatagagccatatttttcattttccattaaaaatgtttcaaatactgtccctgtataataatccagccctcttattatttttaagttaattgcatattcattatctcctacaccaaaagtcttcagcatttttttaactgcttcaagttcttctaaaccctttttaaactcctctgaattaaaatttaaattttttagttgatctaatatattttcattacttccatctaaattgatgattttattaataatatctgctttttctattccaattaattcatttaatgatttcttaaactcctcatctcctattttatcgtatttatcaattaatattagaacttcagttgcattaacaatctctaaatcatttaaaacagctgataatatctttctattgcttatttgaaatttatatttttttaaaccgatagccttaaatcctttagaaaccatactgattacaaatgcatcattattaatactaagcctgttattacctatgatatcaatgtcacattgataaaattccctatatcttcctctctgatttctttcacctctatatacctttccaatttgatatcttttaaatgggaaggttaattcattaaaatactgtgctgaaaatcttgcaaacggcactgttaaatcaaatctcaaagataaatcattacttcccttattgaatctataaacttgtttttctgtctctcctgcacttttagctaataatacttcagacttttcgatgactggaatatcaatttccaaaaatccattttcttcatatactttagttattttccttactatgtctttaaatatttgttgctccttaggcaatagctccataaaccctggtaatatacttggttgtatcttattattcttcataatcttgatctccttctaataattaatttttatatttgatagataaattattttatattttgctttaaataaccaaaagccatgcaggcatatatcctacatggcttaacaaattattactgacatttaatttatcatcaccagcagatacaagcctacgaattatagacttgtatctgcctatttaacagaccaagtcttactggtgatgatgtatgaaatttatttttttcatattaaatgctttcataatactttctcctaaattttaatttctatcattatacaatatgctaatcttattttcaatagtaatttgaccatttccaattgatttttaatactataataatcattcaaagtgataaacttcctgtcataaactaaagaaatcaagacaaaatatatttgttagctaaattaagtctatctaaattttactagtttataaaaagtgaaaggggaacataaattatggttagaaatgcatacgacgttaaaggtctaaagatactaaattcagatgattcagtgcaaaattctgttagtagtgtttactctggcagtgctaaaaagtctgcttctaaaaaaggcaatatgacaagttcttcaaattcatcagatagttcaaagtaaaactaattgtattaaggtgcaagcatatagataattcaactaagacctgaacttatgcaataatccaccgaaagtaaaaacattgttatttcacaggactatgaaaatttcgctgaaagtgctaaattgcaggttgcaccactaatgcttgctcccaatttcattgtgacaagcattagttgaacaacctgcaattaagagcttttaacagctcattttcaatgcctgctgcataaaaatgtttctactttctagtatggtatttattgcaaagtataatccaaattcttaaattgggtacctataattcaaataaaattccaatccataaaaatggcccatataagcttcattaagataatatataaactatcaaatgaagtttctatgggttacatacaatataatttagttttttctcaccattcataggcttccaaatgttaatttaaactagcctaataactttttactccctttgccctctacttctaccttactttgatgagcttttcctattcccttgtattcgttaatcatcataatagcagttacaataaatacaattccatcagttatgggaacagctgcccatactccttcgattcccattaacattggtaatataatgataagtggaacaattaatgcaatttgtcttgatataactaatacacttgcattttttccttttcctattgattgaaatgctgttactgacataatccaaaaacctaaaaccggaaaaataatgtacatcaatctaaaattatttattccttcataaacgattgaaccatcttttataaataatgaaagtatctcttttgggaaaagttgaattggtatccagaaacatagtgctagaactgttgcaccagctacaaatacgtttatacttttctttactctgtcatactgttttgctccataatttgtaccaacaactggttgtaagccctgtcccattccccatagcggaataaatgaaaatgctaatacacgtaatgcagctcctattaaaataatttctgaatctcctccataagtagaagccattttataaatcactacttgttgtataaacatcattatttgcattaacatggctgaaaatccaattgaaaatatttctggaagcaagtcaaattcaattttaaaaccatgaaagcgtacattttcactttcttttataaaataaaccatcgtaatgacagcttgtataatctgcgacactaaagtcgcaactgctgctccttctacctggtgattaaataatataatcataattggtgcaaggataatgttagttattgctccaatcgccataaaaatcatggcttttttcattcgtccctcagcacgcatgatcatattagcactttgagcaaagtttataaaaaatgagcctataaatactatttgcatatatcgcactgctaaatccaatatttctccacttgcaccactaattaagagaacttctcgtgcaaataccactcctattacagttacaattgctgaaagaataagtataagtaccaataaatttcccattattttatttataatatcactatcttttttcccaatagccctcgacaaaacggatgcagatcccataccaattaaagttgaaatcccactatttattaaagcgaaaggataagctacagatactgcccccatagcatttgtcccaatcatttgtcctgcataaatagcatctacaaatgaatataagccaattacaagcattccaagtactgcaggtacacaaagctttatcataagtgcaactggctccttcgttaacaattcttctctcatattattcaattataattcctccattcattactacaataatatatcttaaaaattctttagggatttcatcctctcattcataattcccaattcgtaattcttaattctaaatgtgagcttgtttattgtgccaagctccatccctctgctttttttctaatatttatgaatctattataaagaccctcttgattgattaactgcttatgtgttcctttttgaattacttttccatcactaattactaaaatctgatctgcattttgaattgttgcaagacgatgtgcaatagtgataatagtttttccattagttaaagcattaatagcttcttgaatgtaatgctcattttctggatcaacacttgctgtagcttcatcaagcataataataggtgcatcctttaaaattgctcttgcaattgaaatacgttgtttttgacctcctgataaagacgctcctccttctccaacaaccgtgttatatttatctggaaattccattataaaatcatggcagcgtgcttttttagctgctattatcacttcttcaattgatgcagatggatttccaaaactgatattattcaaaatggtatcttgaaacaaatatactttttgaaataccatacttatattagacaataagctatcgcagataatatcccttacgtttactcctcctatgcttacagctccctgctgtacatcataaaatcttgcaatcaaactacatattgttgattttccacctccagatgtgccgacaattgcagttgttgtattttcaggaataaaaaacgacacatcttgaagcacattttttttatcatatgcaaaactaaccttatcaaaacatatatcataggaatctaatactacaggcttactatttttatcaataggttctacatttttaaccccatctacacgatcaagagatgcatcaatcattcgtatcatatttgaagaattcccaatctgctcaacatggccatagattataaatgaaaaattaatcatcataagcatggtagatacttccatagagccatttatagcaaatattccagatgcaaaaattatacctacagatgcaagtttaaagataaatatataaaaagatgtcactggaacaaattcctgctctattccatagtttgttttacggcttttttcaaatgcattttctatactctctttagcaattccatcctgtttaaaagcttttacaattgatatacctctgatatattctattattgccgttactaatccagcttgattggcttgacgtattggtgctacaattctgctccttttgcttatataaatcattactaaagatgttaatattattcctccaagcgtaattaaaccaattctaaaatcaaaaaacattaagcataacgagattgtaattgaactaatatacccatttacgactttattaattaatttcattgcgttattttcaacaaatgaaagatctgttgttacagaagaagtaatttctcccgtatctttctcaccaaaaaagcccattggaactcgctttaaggtatcaccaattttaaggcgctgctctgcaaacacttcataccctatgctttcttgtgaagttgctaataaatatgaaaacaacattctgcctaagagtgcaaaaatcatatatcctaagcaaaaccatacttgattaattgttataacagttataccttcaatgttttcaatgattaatttcaaaacatacgaagctccaagcaccggtaaggtcgagaataatgcctgcattaatgcataaacaaagctgatatacatgcgtttagaattatcaccggataaatcaatgattcttttaactacttttaacatccaactacccccttattcaaattctgatttctagttgattcttttcctgctgcccactttttagaattaatatgggcattccacatatcacaatatagtgcacagtctttaagaaggtttttatgagtcccattcattacaacttttccattttccagaaccacaatattatctgcatcttttactgttgaaagacgatgggctattacaagaagagttttacccctggttaattcagaaatagacctctgtaacttatcttcattttctggatcagtaaaagcagttgcttcatctaatataacaataggtgcattttttaaaatagctcttgcaatagcaatacgctgacgttctcctcctgataattttccgcctgcatcaccaacatttgttttatatccgtaatctaatttgctgataaactcatcgcagcaagctagttttgctgcttcaaaaacttcttcatctgacgccgatggatttccaagacgtatattttctaatattgaataattaaacaaaaaattatcttgagttacaaaactaactatatccatgagctgttctaaaggtatatcacataaattaataccgccaattgtaatttctcctgctttaacatcccaaaatctagcaataagtcttgctactgtggattttccaccacctgatggacctacaagcgcagtaaatttcccttggggcaaagttatgcttacattatctaaaacattattttctttactctcatcataagaaaaagatacatttttcatctcaacatcataatttttaaatgttacctctttagttgttgattctaattcttttaattctaaaagatcatttgttgcctgcactgcataattaataatctgcatttcatttataaaatctgataattttaaaataggttcaattattccaagtgagagaattatgcaaattgcaaaagatgatgctgttatttctttttccatgtaaagatataaacctataggcagtactcctagcaatgttgacggtaaaattgctgctgcagaagatgtgtatttccaagtactcttaaaccaatccaatgtataatccctaaacgatataacagcatttttatacttttcatatgaacttgtagattgattaaatgctttaattacctctattccttctatatactctacaatagtagaattcatataattattggcttccatgtacttatcatattttttcttataactcttcatcaccattagatacggtatcattccaagaggaattgtcataagtgctgctaatgccatacgccaatcaatataagttatatatataaaaattcctattggtattaacatatttgaagtgaattcaggaatcatatgagcaagcggtgtttccattttttcaatttcatctaccataacatttttcagcttaccaactgtttctcccattacactcccaaggggtgcatacataagcttggttgcaactttccttctcatattttttaatatatgaaacgcagaattatgagataataatgttgatattgtgaacaaaaggattttcataaaatatcctaagagacatattggtgaccaaaataaaatattttcaaatgttgtagtatcgttgaagaacataacgattatattagcaactccaaaatacggcaccattcctgcagcaacacttgctattccacaaacaacagataatatcattaagtgtttatgttcctttgctaaggataaaataatagaaatccatgatttttctttcatataagctcctcttttctttaatacttaaaacctatttcatagtattaacttttaatcaataattttttatatcctaaattcacatatataatttttataaaagtatatccattttagacacacatacttgttaaataaaatcatttttgatatcatttaagtataatatattactttctatccaataattatgatatattatcgagttataaccggtcaatcaatttggcagtgttcgtctcttcatgatacaactttgtctgatcgtgctattactataaaaggagaatttatatgaaaaatattttaaaggaattacatgaaccatgtctcaatcaatatggttttgaaagagttgaaaatgcagaaggctttaatgatataggaatatgttataaagtctcgtctgatataggcaaaggttattactgggtttatgcaaaagaaaatcttttttctatatcaattcatgatcttgttttatatgaagattattttatgaaataccagcagccaagatatttcagtataagttattatgattccgtctctggagaagagttaaaaccttataaacgaattaatgctaattgtatacgcagccgcatctctgaaaatgatttatatcaggctatataccataaaagcatccccattagttctatagatatcgatatttcgcctgattattatgaagaatatttaaataataaatatccaaaaggcttccaaaattcaaaaaatgcatttttaagtattgatggtctaacagattttccagaattaatattttctcttagacaaataagaaattttaaaggctgcggggatgttgccgccctttattatgaaagtaaagtagccgaaataatctcattaattgctgaaaaaagcaaatctttaaatgacttaaaaatggacaaagccttatcaaagcaggatattgaaaggttagaatctgcacgttcatatattgatgatcattttgcctttgaaatttatttggaggacttggccaaaattgcttatatgggcacaactaaattaaaatattcatttaaaaaagcataccattgtacaattacagaatatattcaaaacaaaagaatggcacaagctgaacatttactcagcaacaccgattttacaataagtcagattgcacaaattgtcggctataaccattttggacgtttctctaatttatttaagcgttctactggtttactgccttctgaataccgaaaattagtaacaaaaagttaaaaatataatgctgctgcttaaaaatattctcttcaagggtgtagcagcatttttatttatagataaacaactgatatttctttatctgtgaaattcacgaaaataaacacacttaaataagccttataaaaaggctctgtattttatattattgttaaaaaaaagctatggtatgtatgcaaaagatgttggtaaaatttattggaaatatgtattaaaaaaatgttggtaaaatatattaaaaattgacaacatctttttaatacatctaagaggcttttgggaagatacaaagataaatgaggcactgtgaataaagcaccatgactaagcattatgaataaatcatcgtaattaatatttaatggaaattttaattgacaaaatttttgatcaattacaggtctgaattactctgtcacatgtgatttctaaaaactcttcatcatgagttactatgaatataatatgcccctcttttgataaacttttaataagcctgctgaccgtacacatattttcataatccaagccacttgtaggttcatcaaaaatcaaaatcttcttatctgctaatatacccgtaacaatagcaagccgctgtttttgcccgcctgataatgccatagggtgattttctttatacatctccaaattaaattcttttaataaacttaatactctattatcttctactttcttttttaataacttacattcatcccatacactttctgcaaaaagctgatgatttacatcctgcataatcatataacaaactttgtttcttttttttggagataaaaagatttcattgagctttatctttccatcaccttctttaattaaacctgctaaacacctcatcaatgttgtttttccaactccattattgcccaataccccaataacttcgccttccgctgctgaaaaattcatatctttaaaaatatactttttatcatttttatatgataatcccgatacgattaaatttggtttagctgtttttaaataatttgaaagtttagtcactattggctttattgtcctaagccccatttttattcgctgattttcatctaaatttaaaaattcttttcttttaaatacttgagagaccttaccatcttccatataaataaccttgtctattaagtccgctaagtaataaatccgatgttctgcaatgactattgtttttccgctttcttttatttttttaagttgtgctttcaatatttttatagcatttatatcaagattagctgatggttcgtccaaaacataaacctcaggattcattgcatatattgccgcaaaagcaagtgcttgtttttcaccgcctgacattttgaaaatatttcttcctaataacctgtttatttttaaatcactaatcgtgtctgaaatcctctttttaatatattctggttccatcccttcattttctaatccaaaagccaactcactatcagaatctatattaaaaaactgagatttaggattttgaaaaacagatcctatctttgaagataattcatacatttttgaatctgcaatatccattccagctgaaataacctttccttctaacacgccttctataaagtgtggaattaacccattaataacttttgttaatgttgtttttccacatccacttttaccacataacaaaacacattctcctgatccaatatggagatttatattttttagattgtatctgcttttttctgaatacttaaatgaaacattgttaatatctatcataaaatacctcctaagtgaagcattgaacctgtgataaaaacaatccctaccccaatgcataaataatcttgcagatgaaaactcatatcaacagaacttgtttttggttttggattttcaattcctctagtgattgcagcagcgcttaattcttctaccgtattaaccgctgaaattaaaattggtacgtaaatacattctacttttcttcttaatcctcttacttctctcattttcattgcatctcttatatgcacgatttcctcttttatagctggaaaataacgtattgtaatggataatggaataatgaccttttgaggaatattccattttcttagtgataaaataatcaatcgtactggtactgtttttattattaattcacctatcatcatacacggaagaagttttctagcataaacagctaaaatcgaaaacatgattgctaaaaaagtcggcatgatctctattaaataatattgaatagctaataatattataaaaaatacacaccactttatggctgattttctgcatccacaaaaagatagtaatattgcaattaccattatttcagatgcttctatatacacagaagaattcgtaaatgcgactatatttgcaataaatataagtaatatttccgtccttggatcaatactcaaatattttttctttagtctagacatatttaaataatacctgcctttataaaatgtttttttagcatgcttctgccaattattccacctgctaaggctaatataaatgttgaaattatcattccaattaacattccagaagaagtgagattcctcaatccatccacgtaactactagacattccctgttcaattatagattcaaaaaaactatttccaaataaccaaattggaagcggcgaacctaccatccctagagaaaacactgcatatgctattaaatttcctgtaaaacttttatacccaaacatatatcgaattaattctgcaataatacttgaacttgcaaaagttaataataataccactgtaaattgtcctgttgcaaaataaatgattgctgtgattgctgccataatcactacaggtccaaatttttgaactttttctatcatcaacataaaaataactccactaagcagtgcaatcaatgcaggcataaatatccatataaccggtgaaatcccgccacaaatcataataataagattaacaacaaaataaattgcagaaaatacaccaatagtaactaagtctttaacttgtaatttgctcgtatctttttttaacatttttctttcctccctataccgtagaccattctaattttctaatattaaattaacttcatttaatgctgcaacacctccctgagaatttttgtaagcatcatataaaatcgccttcttttcatattacattttcacaaatataacgataatcaaataatttttgtggttctgaaatattttttatacttgataaatatagatatagttcttcattatcaaagtctaaataactatttgatcctaactgctcaatatctttaataacaattttttttagattcatataaagattaaactccttgcaactactttttataattatgtattaaattctctataagtttgaatttacatgaaataaatgttaaaatatacaaatgattcatttgatttcttatttcaaatgataatgataattaattgttttgtcaaaatgtcttacaaaaggttatattcttaaggcatttaaatgaatcacttataaaataagcttttctaatactatccacatacaccagcgtgatattgagggataattataaataaaaaaaagatatattgggactttaatgtaatatttatatacttttagaatggagtgattaacttgaagaacaagaaccaaatagacacaatatatagaaaaggttatggcaatttagctgaacaactttcgtttaaaaagactactcaaaatgaggaacaaatttatgaagtaccaataaaaaacggaacaggttatatttatcaaataaatcctgctcctggggtttttatttctatgtgtgattgggtagcatataaaaagatcgagtatcattaccaagtaaatcaaacattcactgaaatctatttgctagaatcaggtaatatttctttagtaatgaacggtaaaaaaacatattcaataccatctggtgtgaatgtttatataaataatatatctcaagggcgtatatgctacaaacctaatattccaataaaatgcatatgtatattactttttgatgatttcataagaagtaatattgggaataaatttatcgataattatataaatttcgagaaaacttttagttcaaaatctattaactataatactcctgaaataactctgctctttttacaaataaaacagaaactattatgccgtgaaaaatcacgtttatattatgagagtaagattggtgagctattatctataattagaagcaactttaataaagaagaagaacgactaaaatctattcacagtaaatttcctttaaatgaattaaaaagattggaactagtaaaattggcactcgatgaaaatatagccaatcctcctgaaattgatcaattatgtaaaatagctgctatgggtaaaacaaagttaagggaatcatttaaattattttttaatataacaatcgggggatatgttcgtcaggttaaaatgaaacattcattaatactaatgtcaaacaatcagctatctattcaaaaaattgctactagcttagggtattctagcacaagtaagttttctataagctttaaaaagatttatgggcaatctccttctgaatatcgtaaaaatattctcttaacttcttaaaaatgattcttgtagttaaatctaataaaaataacccacgaaagctaaaattgacatgatacctttataataatagtattcaaggtacattccaaatcagattttcgtgggtctttttgttgtaagagaaagatatcaaaacctgctagcaggatttctcattacttacctacatctattaatcaattgatttaaatgagtataatttttaatatatcaatctataattgtatacataagctttttaagctcacctttatctctgccattcctttgagcataatcgttaaactgatcctgatgtattttattaatgtcaaagtacttggcatctttatttccaaagtaaagaccacaggtacttgcagttggtgacatcatatagctttcagtaagttttacgttaagctctccttctttatcaagtaagttaaataatttaactttttctgaatggtctctaagtgaaggatagccaattgcaggtcttattcctctatatttacctttaaatatttcttcgatgaataaattttcatctggcgaatatgcccaatattcttttctcactttttcatgaacatattctgcaaaggcttctgcaagtctatctgcaagtaaaataaccattgttgcaccataatcatcaccagaggctttaagcttatctgcgtattcttttgcacctatcccacctgttgttatgaaagcacctatataatcctttattccagtatctttaggagctatgaaatcagataagcacatatatgtattatcttttttcacttcttgctgccttaaaagattaaagttaatcatttcagaatcattatagacttcaatattatcgcctacagaattagcttcgaagagaccaaaggctgcatttgcttttaaaatattttcactctccattttatcaagcattttttcagcatcagctaataatttcttagcctcttcaccgtattttgcatcttcaaggatttgtggatatgtcattcccatatcccaagcgatgaagaagaagctccaatctatatattttcttaatttccctataggaaaatcaataaatttctttatacctaacattttaggcttctcgatttgctctttatcccattctttcttgaaattattttcccttgcataatctaaagtgacaaattttctaggtactttgttaaatgtttctcttaaagtttcatattctgattctatcttattaagatattctgcttttttatccttatttaaaagaagtttagcagcttcaacagcttttgacgcatcagttgtatgaattactccaccagaatacttaggtgcaattttaattgctgtgtgagcctttgatgttgtagctccgccaaccataagtggaattttaaatccttgcttttccatttcttctgctacatttgacatttcttctaaagatggagttataaggccgcttaaagcaataatatctgcattttctttcttagctgtctctaaaataatttcagtaggaaccattaccccaaggtctataacttcaaagttattacaagaaagcactactgacacaatatttttacctatatcatgaacatcaccttttacagttgcaaaaactacttttccagcactaatgcttccactgctacttttttcctcttctaaatatggtcttaaaacttctacagcctttttcataactctagcgctttttacaacctgaggtaagaacatcttaccatcgccaaaaagtttccctacttcattcattccatccataagaggtccttctattacttctaaggacttgctatattctgctcttacctcttctacatcttctttaatatatttatctataccttttactaaagcagtttttaatctctctttgacattttcatttctccacgcttccttgttttcttctaacttattgtctaccttattgaagttagctgcaaattctaaaagctcatctgctgcattttcgcttttattaaaaataaccgcttctactttttcaagtaagcctttatcaatttcatcataaatttgtatcattccagggtttacgatccccatatccattccattttttattgcatgatataaaaatactgagtgcatagcttctcttattacattgttacctctaaatgcaaatgaaagattacttacaccaccgcttacttttgcataaggtaaattctcttttatccatttagttgcattaatgaaatctactgcataattattatgctcttctattcctgtagcaattgttaaaatattagggtcaaatactatattttgtggagggaaattaacttcatttactaaaatgtcataagctcttttgcatatgctaatttttttctcataagaatctgcctgaccattttcatcaaaagccataactacaacagctgctccaaaatctcttataatagacgcctgtctcttaaattcttcttcccctaccttaagacttatggaatttactattggctttccttgaatggctttaagtccagttacaagaacctcaaactttgaagaatctatcattactggaacctttgaaatttcaggttcacttgctaaaagctttaagaatttatccatctcttctttggcatctaagagagcatcatcgaagttaatatcaactatttgtgctccattttcaacttgatctttagctatagataaagcttcttcataattcttttctctaattaatcttgcaaattttgctgaacctgctacgtttgttctttcaccaatattaataaaattattttccttattcgctctaagagcttctaaaccacaataaacagtttcagtttcaatgtctggtatctttctaggtgaaatgtcttttatagcttcacttactgcttttatatggtctggtgttgtaccacaacatccacctacaatattaaggcatccgtcctctgctaaactttttattaaagctgcagtttcttctggcttttcatcatattccccaaaagaatttggcagtcctgcattagggtaaacacttatgtatctattttgagttcttgaaagatattttacaaatggtatcaaatcttttgctccaaaggaacaattaagacctattgcaattatactttcatctaccatagtatttgcaaaagcttctaaagtctgacctgaaagaattcttccacttttatctgcaatagttccagaaattattacaggtaagtccttgcctttttctaaaaatccttgctttgctcccataagtgctgctcttgcatttaatgcatcaaaaattgtttctataagaattaaatctactcctccatctataagccctaaaacttgttctttataagcttcagctaattcatcaaaacttatatttctataacctggattttcaacatcaggtgataaagatgcagttttatttgttggtccaagtgatcctgctacaaaacgcggtttatctggattttctgctgtaaatttatctgcagcttcttttgcaagctttgcaccttcaaaattaagttcatatattttatcttccatttcgtagtctttttgagatatactcgtactattaaatgtattagtttcaattatatctgcaccagactccaaataggcttcatgaatttctcttattatattaggattagtgagatttaaaatatcattatttcccttttgattacaagagatgtttaaatttcccctataatctttttcctctaatttataattttgaatacaagtccccatagccccatctagtactagtattcttttttctaataactctttaatttgtaaattcatcaaatttcctccccaaattgttttatataaaaaatctaataggtttttattagtattcagaaatttatataattctcttttatccttaagtaagccctaaaataaacactaataaaaataaacctatattttcttatatcaattttaaatgatttgccataaagagtccaattattttaatattttattaaaataaaataagtaatatccatggcaatcctaaatctcctatctctagtcaggaccacccgtgaaaacgggtggcttgctctgcgcctgtaaggctttgttactggtcgtgctactcgcacgttgaagcatttaacttatgcaaagctcccctagtgccattaaaatggctcttttgtatggattttctttgttttttgcttcataatatgctttttttatatacttaaactaaacattgttaacttacaagtttgttcattttaatactctaagcgtctcaaatgaatttattctatttacaaagttagttttttctacgcatagctagaagctttccagaaccaccggtctaaccggtggtattctttatacaaaaaaatgaaggtgcctcttctataagcctaagagacaccttcaaaaatatagtttcaattcacaatgcacattttacaattcactattacagctgaaattctagcaatattttttaattatgatgaagaattatttttgcaaaatatctataatctactatttaatttttattgtgaatttttcatcaccataaacttctattgattttgatttatctatggttttaacagaatagtctccatctttaatttctttattgcaagtaattgtatactcatcagtatctgcattataagtagtagcttctttttgttcttcgaaattataatcatcactaaatgagattatattttcaccagttttattatctactatttcaattggggctgcattgactccatatcttgatttatagtaaatctttgtttttccatcttcagtatgcactttagtaatagttatatattcttttccatcactggaatataactttgtttctccttttaaatttagtttttcagcaatattattgtcagtttcatggctatcattatttttatatttccatggtataaatgttaggtaatcagtatcatcatagatttctttaaaaccattactgaaatacattatataatttccatctttatctttatcacctactgcttcttctgacttgtttgtaatatatcttcctttattatcaaatacagcaaaagataatctatcagcattttcttcatcatccatacgtgttccttgtatcactgtatttagtggtgttgtaataattttgtttatatgatatccactaactatattgcttaaatctatatcacactccttttcattcacttttccattaaccttttcactacttacaggaatattaaagttccaagttcctttaataggattatctagtcctatttcgtctatatctaaatttaatacaaatttatctggtatttctacatatccacccaagaaatgttcattttgaaactccttaggcattgaattatgctttgacacattgtactctatagaacccgcaaaggttttattatcattcataagctttccagttccacctgcactaaaagtagtttctttgccatttattcttaattttgctcctggaaatcttggagtatcttgtatttccttttcactttcgatagtataaaatattgataattgaacttcatcgtaaaccactttatcaatggtcatctttaagccactactttccttagttatgtttaaatcagaagcatattcatcataattttcataagttttgttggtaaacattttaaatatattccctataataggaatattgcttgcatatgttggcatagccattccaagtaatagtgttacccctatacagcttaccaatatgcagcaagctttctttatagtaaatcttttcttatttatcttgttaagtgtactatcaatcttttgattgatatcatttggtacataattaatttcatcctttagcctttttcttattttatcatcaaataaatcatcatttatttctatcatatctccacctcgcccattatttctttaagttttgttctcgctcttgtgagtctagatctaactgttccatctgaaattttcagcaattttgcaatatctttagtactcatatcctcaaaataaaatagtactgttgtcactcttaactcttcgtttaatgaatttatagcctttgtcaaatcaatattttcataactatcattatagatctctgtatcgctattttcagataaataagtaactttcttaccttttcttaatatttgagtgcattcattaattaaaattttaatcaaccaagttctaaagtactcatcttgtttcagagaatttatcttttgaaatgattttattattgtattttgaatcgcatcttcaatatccactgtatcctttaaaatccctctggctactctgtaaatattcaatctattttcatctataagagctaaaaaagcttctttgtcgcctttcttcgctttagatactgttgactttttcctataatcaaaaaatgatatcaactccatctttttcctccttaatttatactacctagctaagtattacaataattagatggggcagaaaacaaaaacgttcccgtaaatttaaaaaaaatcaataaatcttttccataatactcccattgatcttctgttcctgtaacttttccataaattctaataatatgatactatatttttcctttagaaatagtaagaaatttttacataaaaaatagccattctatagatgaacagcattaattttagacttattatgtgaacatatttccatattcactatatataattggttatcttaactagaaatcataaatatatttgtgaagaaaacatttgaaaatgagctgctaagattgttagttgtagattgttccactttagcttgtcatgctgaaagcgggagcatgctaaagtggtgaaatctgcaacttagaatctccagtgatattttcatagcttttcggaacaaaatatttatgatttcggtaagttaccacataaatctaattttaaagttggatatctatacgaacgactatttttcttaatatatttttaatgttattctgttttattatttagcttgcttcaaaacatagtaccaaggagttgctcctctttctatataatcaccatttttccattcaaagaacatatactttgaaccgtttatttcttttattatatatttagaagcagttttatcgctagtatttaaaactaggtcttttgtccaagttatatttttattctctattttaccattttcatcaaagattaaattatttaagtacaaatctccattccatgactttttctctggattaaagttatttatatcctcgacaaaatcaacgctatcccattttccaattacttcaggatcattaataaaaggatagccaactttatcagctctcgtttcaacttcattaccagatatattagtattaagtgatggggtagaactaacttttttcaatacgtagtagcaaggtttctctcctctaattgtataatccccgctcttccattgaaagaacatataagttgaaccatcaatatctttgattacataactactgtcagttttatcaacatcattaagaatgtgatccttagtccaggtaaatacagtttttgctaccttcccatcctctgtaaagtttaactctttaacaaataaatcacctttgaattttttatcatttacattgaaatcttctatgttttcaacaaaatctacactttgccactcacctattatattaggatcattaacaaaagcataatcaattttatctacctttactgcattacttgctccatttatatttgcagatgcctttgcatcagtaagtgcaataccgctaattacaagcaaagatgcaactgccattgcagaaaatctataggcctttttattaaaaacttttatcataacaattctcctttttacttcagatttattatttactatggaagttgccccaactaaatgaactgactttgaaaaatgttctatcaaatttatgattgtaaatccatattccgcaacttcttcaccttctgtataagaaagtgcaagtgaatcacagcatatttccatatcctctttcatctttctaagaccataatgaataattggattaaaccaataaatagtctttaaaaaaattattatccagtttataactatatctttacgtttaaagtgagataattcatgaagaaatacatatcttaatttatcaacagatattatcttatgaatatctgttggaattagaatcattggattaaagtaacccagtagtgctggcgtctttacgctagaagtctcaactagcagtatatctcttttaattttcattttattttggcagtattttaaaacatctaaaaattctatgttattttgtatggactcgctgcttattttatttctcagttttttatatgcaaatagaatatatgtgaatataaacactgctcccataagccatacaagactcaatgtagttaaacttgataaactatacctattaatttcgttattgctaaaatcaatggaatttatagttcctaggataacatcatgattagacatagaactagcttgactgctatccttttctaacatacttccaaaatgtacttccctattaggaattaataacaatatatttttccctaatttatttataagattgaacatgcttaaagtgctctcaggaagcttaaatatggttaaacgcagtattactaaaaaccataatgcatactgaaactttatacctattctctctctggaaaactttctgaaaattaaaatgaaacaaatcaatatgctaccagtaatggatgtttgaaatattattttaaatagctgatcaagataattaaaatactcgtacatacactacttattcctctcgtctaatatccttttaagatcatctatatcctctttacttaaatcactttcttttataaaacttactagcatatttttaatagctccattataaactttacttaaaaacgtttgattctctgcacgtatgcattcattttcatttacaattggataatataagtattttctgccttcttctttaaatccaagtgcattcttgctaactagtctgcttattaatgtttttattgttttaggcttccaatcttttgtatcttctaatgcctcaataatttgatttgatgtgcgtggtgaatctgtccagacaattttcataacttcccattcagcctcagatatcttaggtatttctcccataactttcactcctcttttttgtattacaattgtaatctataattagaatacaactgtaatccttaattgtcaatatatgttttgaataaatttcagattaaatatcaatactatatacgtatctattttagagtatcttttaattttctacccaattaaatacgacctgattttaatattgctattaaaatcaggtcgtattttttattctttaggaaattataatacaattaaatctgtgaataacttttatagtagtctattttacctgggttaattactataatgaagaataaaaaaataaatcatattcgcctgccaagtttttctcacatgcgttcgaaaaggcagatgcgtgaaaaaaatctccggctccaaagtcgcctgcgatttttttattgcttattataaaacaatccagcttcctttataatttcttgctctgtaaataaactttgtacagcttcagtataatcgcttaacttttgtgcacttcttacttttttagcgtattctttgttatctgaaaatatataaatcatatatccaaatagttctttcattctatttattgcatatatatcttctggaaacacctctatatatctatttaaaatttcatcatggaaatcttttaatatatttttgcttgtattaatattattttttattacgttaatcaaccctggattagcaagtatgcctcttcctagcattactgtatttacctcaggaaaatccgctactaatttattataatcattaattgtgaaaatatctccattgtagcatactgggttattacttagtgataaggcatctctaaatacacataaattaggtttatttccataaaaatctttttgtgttctagggtgaataattaactcttctaaaggatatttattgtaaatctttattagctcataaaattcttctggattttcttttcctattctagtttttatagaaattttcatatcatccatcttgaatatttcatctagaaatgagtctagttcttccctttttgccaaaaatcctgagcccctattctttgaaacaacagtcttagcaggacatcctaaatttaggttaacttcgctataccctagttgttgtaattttctagaagtattaatgaagccttctgcatcgttagtaagtatttgaggtactatattcatacctttattgttttcaggcaagacatctacaagctccttagtcttaagacttctactttcatttggaacaataaaaggtgtaaagtatttatccacgtttccaaaaaacttttcataagaatttctatatatatattcagtaattccctccatgggtgctaaatagtatttcatttgataactcctttatgtatcctaaaaaacaaagccttttaatacatcatttattgtttgcaaaacttttaacagtaattttaagatatatggtaagaaaaatgatgctaataatactgcaccagccaaaattaatatattataatttatcgcttgtcccattttaacctgatataagtgtatggctcccacagatatagatccaacaattaatactttagttgctatccacgaaattatgtttataacttgtaatactgctattattactgataatacaactataaatgggaacaccaatatcttaaatggtagcataatcaaattaaatgcctttttagtatcattttgcgatttcttttcggctgctctttgttttcttcccttttcctctttatcatcgtttaaactattttttctctctttatttctcgaagtttcttttctctttagattattacttttccctcccgaactctttgctttacttctagaattacgcctacttttataagcttcatattcattactataatctttttctttttgtatttcttttggatttatagctactgttaaattttctttaaccgattgattttcatctaagctaattaaagcttcataagcctcatcaaatatcttcaaaaattgattaagtcttttttcattaaccacttctttttttattttctctacttgcatttcataggctttttttatctcttctttcgatgcattcttttctacgcctaataacttatggtaatctgtcattacttctctccatttctttaaattaggataatcctattttaattttaaccttagtactccttaaagtattatacttaaaattataatcaatttaaagcactgactttatacaattctattacaattatctatttcaattaggatttattaatactttttgtaattatagccaaactacttaatatataatgattaatttatttgatatgcgctaatcataactgcttacttggaggttttttattatggagcaaaataaagtagatagacgtacacgaaaaactaggaaagctttaatagaagccttaacaaaacttatgtctgaaaagaaaataaataagattactgttaaagaacttactgacttggctgatgttaacagatcgactttctatctttattacaatgatatatatgatatgttagaaaaaatcgagacaggattattcaatgattttactgaggcttatgacaaattttcagaagaaacagcctcctatgataatttattatcgtttttaacttatttacttgaatttataaaaagcaatgcagatatgtttaaaatattacttggacatgatggagattatgcttttatagaaaaatttaagaactttataaaatatgctaatttaccagtaaacagttcattttctaatacaaaagcccattattacatcccttatacaatctcagggtttattggagttgtacaacagtggcttaatgatgatatgaatgttccacctaaagatttagctgctactataatagaaatgttttaacttcatgttatctttagactctctctattcaaatcatcgaaatatacctatatctctatagtgtatgctcttggtataatacaaaaaataaaggtgcctcaattttttcggcacctttattttgattaaatctatatttcttctatataattattatttttcattgcttgtgcaatttctttcattttagtattcgatttttttgaaatatcttctgatagtgacataagtgctggtattgctactggaagtaaaacaaaagctaataggaataatcctatgacaacagctattgcgagttccattaatataacaatatttgaaggatataaagtagcgaaagttccagctaaaataatagccgctgacattactactccacctatttttcttgatgctaaaactatggcttcttttgcagaaatatttggatattccttaaaacgcatcatcaagaatatactataatcaacaccaagtgcagctatcattataaatgagaagaaaggaacattccaagacaacccttctgctgcactgctaaataacatttttgatataaaggctgttgatgataaggctgcataataagccactccaagtgaacctactatataaactggaatccaaaatgatcttattacgataactagtaatataaatatagctcctaatactattatttgcgtaaaagttatatcatgtgttgcaacattacttaaatcattagaattagctgttgcccctgcaactccatattttacattagaaagctttgtaccactaagattattttgaactacagtacttatattatctataagattaattgaagaatcagaatatggctctgaatctaaagttatagttaacttagctatttttctatctttagacatatacgcatcaaacattttagttatatctgaattattaaaagcttcatctggtatataaaaactttttgtattagtaagctgatttaaaaaatcgttactcttatcaattccatttgatatactagacaatccattactgcttccgtttaatccatcctttagttttgtcattcctccactaagattatttaatccattgtataaggaatcttgtcctgttttaattttatcagcaccatttcttagttgtgacatacttgaaataacttgttcttgtccagcactaccttgctttaatccattagaaagtgatttagcaccattctcaagttcattaataccttttgcaaactctgaatctgagcttgtactagcaataactgtttttaaaccatcattgacctgatttaagccagaagtaagtttatcgtagttattattagcagtattcattgctgaagtaatgctatctagtgaagaacctaatttgttaatcatctctttaagcgctgctacatctggatcatttggtaattttgcatcaacttttgcgatacttccttgcatcattgatgacatctgctttaattgacttatagatgtctctagggacttatatccttctccaagtgtattatatccattgtttatttctgtgattttgcttgaaatattattaagtccaccatttatttgagctaagcctgatttaagctgccctatacctgatgctaggttatctgcaccatttgctccttgtgcaattccatcattgatttttactaatccattagttattgcatccattccaccttcaagattatcagtaccttcagatagatttttaactgatgaaaaatctggagctgatagactgttatccatcttgtttaatccatccttaacctttccaatcccatcatttgcactagacaatccattcactacagtatctgtctgattatttgtgtaaaaattatctattatagttcccataggctgagttggtcctgatacttcttttatttcctttactcctttaagcttttcagtaagattatctataactgctaaatcttcattattgtctaaaggttcatcactttctaaaaccacagtagtctgcataacctttcctgcactaaacttgtctgtaataatattaaagccttttacagattcattggaatcacttaaatccttaatattatcaaaagataatttatttgcattaagtgttattacaggagtaagtattgctgcaacaactaacaatgaaactactggatgcttaactgacattgaagttattcttccccataaaccactttctttatggccacttgcttgtttagaaggccaaaacaacttactacctaataacttcatagctataggagtaaaagtaaacatttctattaaaagaatagctatgcctatagcaacagcattagctgatctatatatagaaaattgtacaaaagttaaacttgcaaaagccattaagactgttaagccgctatataatattgtcttacctgaagttttataactgtttataatagcttcatctatagttaaaccattagataactcttctttaaatctattaagtaagagtatatgataatctgttccaattccaaaaagtactaaacatatgaacatttgagtgaaacttgtaataggaaaattaaatttattaactagcacacctataatacccattgatgatacataggataaccctactgctaaaagcgttactaaaggtgtaacaactgaacggaacataagaactagcacaactaatataaacccaacagttattaaagcacttttatcaacactctttccgacttcattttgataatcattatttatggcaagcgaacctgtgatataatgatttaccttaacatctttgatttcattattaaaatcttttattacagcattactatctctttcacctttttcaaaagaaactgatacaagtacagttgtattatcttttgatatcatttgatcttttgcttcaggcttactgaatggatctataatatcatttatctgcaatttttctttattttgatttaatttatctataccctgttcaatattattcaaatcaccatctgagagttccttatcgctattaaatactaatagcaatgaatctcccttagaatcacccattttatttatcatttcttgagcaaccacagatggtgagttttcgcttatagtagctccgcccttttgacttagtaccgcattaaaatttggttgattaattacgaatactattgtagctataatccatataagcaatatactaaaacgatgctttaatatttttctcataaattcatcctccgttaatagtcattgttttgtcgacatgtgtttattatattttgatggatttctcatttcaatcatcaatattataaaagcttgttggatataagacatattaataaaaactgtcgaataacttacgaaatactgtgtataataatttaagtaatttatgaaaagaatagaatgaataatattcaatatcctgtttaggaaaatttatatgataaatttctacttaaaacttaatatgattttttcaagatgtgaatgcattttctcttttattttttcttaatctgcattatttataattcatgtaagcagaccacactatactcgtacttaactttaatgcaactttctacgaaataaaaaaatgaataacgccattaaatgacatcattcattttccaattctataaccttttttaactacatacctctagtaatacggcattaattatttattgatttcaattgtaggaaattttaattccttatattttgcaaatttttctttaacaactgtcaaattctcgtctgtatagaaaccaccctgtgtatgcataatttcctttacatgatgtcctctgccttcaacagatgtacgatcacgaattaatccatcttcttggataacaaatttccattttccttcttctgtcttctctaagtttccaccagctccacaaacttgacattcaactggataatgtagcccgtcccattgcacttctccaagaattaatccatttgaatggcaatgtgggcaccatcccataccttcttctccaagccaagttctttcttctactggagtatttaatgatttcattatattttcacccattttatgagcacgttctatcatatcatcgtataataagcactgttttggtgccggaacccttgttgctaaatacatatcaactactttaaaatcatttgtaaaacatgtagcctgcatgctctcaagtgccattgactgccaagaacgagtagatcctccaactgcgattaaacctgcaactctatccttatgttcaattgcaccaataaattctaggaatgctgattcatatgctagatttctatgcatgaattttgaaaatgttgctgttggcattaagtcatatgttggtgctgttgcaattatagcatctacatttagcatcactttcataatttcttccttatcatcttttttgcttaatgtacaaccaacattttttccattactcattccatgggtacaagctgtacatcctgaacattccataatattataatctcttaaattaatcatcttaacatctgcaccttgttcttgacatgcaagtaatgcttcctttaataagatttctgaatttgaatcttttcttcctgctgtaatacctaatactgtaaaactcattaatacttctccttttaatagcttaatattttgttaaaattagtttatacttttgcattttctaattataatttaatatagatacccaactttaaaactaaatttatgtgataacttaccgaaatcataaatattttgattccgaaaagctatgaaaatatcgctgaaggttctaagcagcaggttgtatccaatttagcatgctccaactttcagtttgataagctaaattggaacaacctacagctaagaacctttaacagctcattttcaaatgttttctacacaaatatatttatgatttctagtgaagatatgagctcaaagtaccagcaactctgtgaatatgttaatctaacaagtctaattcttaaattgtttatctatataggattccagaatgatattcaaacttataaattttcaatatcactgctattcagaaaattgaaacggtagatatatggaaccctatatagataccacaatcataaactatgctatactatgaaatatcttctaactagaaatgagtaatatacttttgtggaatgtttcattggtaatttttatggatgtgattctttggctataagttgttccaaatgtgctagttcaaagcttgttctttgaagctagcactttgggtgcaactttgtagccttagaatcacccatcagaattacctagaaactggaacaaaagtatgttattcatttcggtgagacatacgcattagtttggttatctatacgataattagttttgaattacaaaaacaacgatttatcataattttagcattatagaaaatgtcattcatcaaaaataagtcttaaaataacactcttaagtttataatgtttagacattttttcaatttaagagaaataaggagaaattaatgaaaaaggaatacgatttatataagaaaagatatgaactttataatagtttatttgttcaaaataatattgatgatattcttagcatagccgaaaattttttaggaaatcctatttttattttagataccagctatcgactcatcactcgttctaatctagctaagtgtgaaaactcaagcattgaaacccataatggcgaagattacttattatcaggtattattagtttaatgaaagaaaataaatgcatggatactatttataagacaactaattcattttttcattattccgatgaaaatttaatattttgctctattaaagttaatggaatttcaataggatatataagtgttcttcaacgtgatcgcgatttccaagatgaagatttagaacttacaaatatattatccaatttactttctattcaaataaaaaaagaaaatctatttataagtaactcaggtctagatgaagaatattatttgatggatttattagtaaatgacatagataatttggaatatgccagtgaacgcttaaaatatagtagctttactttaagtaaatacaatttaatcctttcaatacccttcaagcagaaatatgaagattatagacataactttggattaagagacttaatccaaagacttaaaggtatacttggaaattgtatttcaacttattataaagatacaattatttttcttattagcagtgataatgaacaaattataagtgagtacataaaagaaaatctattagaatttttaaaactaaacaacttaagatgtggagctagtattaattttaataatttattggatataaaagattactttaagcaatcaatatgcgctttaaagctatcatcatatatgaaaatccatagtaatataagttattttgaagattacattgaatattatcttattcatatatctgcaagttcaaaagaaaataatgatttacctagaattgatataacaaccttagttaaccctctaataaaaaagcttattaaatacgacgagaagaataaaaccgaattatttgtaacactaaaaacttacttagaatgtaatagaaatgccaatcatacatcaaataaattaattatacatagaagcacattattttatcgttttaataaaattcaaagcttacttgatatttcattggaagacagtaataatttatttaaattagaattatcaattaaaatcttaaattacaatgaattttattaagctttacctaaatattatgtaacaacttttaatactgcctaatatattattaatataacaaatgattttgattaacaaaggagaaatgggctatgaaaaagtgttgcaaaaaatcttgcaagccttgctataataacaattacggatatggtaattatggtatgaattatggaaattacggtatgaactatggtaattgcggtggaaactgtggtttgaactttggaaattgtggcatgaactatggcaactatggaatgaattacggtaattacggaaacggctttaatgcttggaatttatggccatttttatttctttaaaatatattgataattattttatcctcaatattattaatacgctcataagtatatccaatctaaattctgtattaatttaaataaaggcaagtatattatagtaaaaaatagacctaaaagatttattgattaaatcttttaggtcttgttgtttaagatataaaattccgctttatatcttaaacaactatttttattctcttggtcttatacttattacttaagaccttgttcataatcttcgatcatatgttttaccatatatccgccaacatatccattttgtcttgaagaaaggtttcctttatccatgctttcataattgcttaatccaacttctgaagcaacctcagtttttaatctgtttaatccttgttttgcttctggtactaatgttctatttcttccactattatttgatgacatatgcatctacctcccttaattaatataaattttgcttggcagtaatatattaaccagtatgataatttataacctataaaaatactagtaaaagtagcatccatagcttgtattacatacttttccttgtttaagaattatatttcatttaagtccataatctcctattagtttaccctgtaaatattaattttttaatagatgtttacgatcatattttttatatataagaatttcatttacactttgcaataaataccatactagaaagcagaaacatttttatgaaacaggcattgaaaatgagctgttaaaagcccttaattgtaggttattcctaattcttgtcacaatgaaatttggagcaagcattagcggtaaaacctgaaatttagttctttcagtgaaattttcatagtcctgtgaaataacaatatttctactttcggtggattattgcatacgtctaagtatagtttataaaatatcttccaaccagaaatgagtgatatacttttgtggaatgtttcattggtaattttgatggatgtgattctttggctataagttgttccaaatgtgctagttcaaaaagtgagaatcgaaattttatatttcgttcttcgaactttctctgtgagcgcttgttctttgaggctagcactttgggcgcaactttatagccttagaatcatccatcataatttccttagaaactggagcaacagcataattcctatttcggcgagttgtatgcataagttcaagttatatactgtttatctatatagatcccaaatttcaagataactgtatattttttatatataatgcagaaaattaatatataaaattggttatttatattctaactactaaatattcggaggctcatatggaaaacgaaatgatttctcagtattatatatttttaatcttaataccaatactatgtggtactgctgctagatatattaccctagtcgttgattacaggcagtatcctagctatccaaatggatatttaattcatctagtagctgggttcatatcttccggaataggtgctattgcaattccatctattcttgaaaggaactttgaagcaataactttcctagttcttgctactgagcagtttagagaagtacgaaaaatagaaaaagaaagtctccaagatcttgataatgtggaacatgtttttagaggagaagcttatattgacggcattgcaaaaacttttgaagcaagaaattatttatcattattagtttcatttttaactagcttaaccatgcaccttgtgcctcataacatcattctaataaatatattaagcggtattttagctggaggcataattttttatatactcaaaaatttttcaaagggtaaatctatcggagatattgctcaagtaaagctagccaaaataactgtaaaaaattccgaactatatgtagatgatatatttgttacaaatcatttaggtacagatagagcaagaaatttagtcaaagatggcggcatggcagcaataatttatccaaatgaaaggcacttcaacagaataattgatcaccacggtcaaaggcaggccataatatttgaagcgtgcagaatgttaggactaaaaagatatcactatactaagtgtgactatgaaacaggaagagtcgctgttatgctagttccaataatttataatgaaggctcttttatagaaacaataaagaaaacacctcttttagagagtataaaaaagagttctagtttaatgaaatctaatcttaataaatagaaaggcaggaataccatgggtacagatttttataatactggttatgaaataatagcatatataaccctatctaaagatagggcacaaaatggaaaccccttaattttagttgcccaaactcaagaggagcaaaagcagctaactgatgatatttcaaaggctttaagggcagaagtagttcaacttacttgcggcgattatatgattattagtaaaaactaactaaataagcctagtggcaggctcaagataatctacattaaaaccgatatttgaatacctaatgctgacagcagtgatcatgctttaacatttataaatatataattcacgatacacagttctattagaaacaatttttatctattggaaattttatattcaatcctgctaaataaagatttactggtataggtgttgcataattattatttggaaaatataatcctggatcgccttctaatctatttaatgccaataatatggtataattaagttctgttatatttatttgatagtttacaaaggtcgcaatagcattgccattagatataacgaatgttaacatataattaaattctgttgcattttttgattgagactcgttatctccttcgcttttatctgacttctcacccatttcatccttttggggttccttgggtttttcattcatttctgcatcagattgattttcttcattattttcttcacatatattttgaagacattcatgtattagtaaatcaatcttttcatctggatgaatttgtttagttttgtcatacttaatgacacccatttgaacttgattaataaatagaccaattataaatgttgtaatgctaatctcaacattagtttcaagagcttcgcctaaactgcctgtaggaccattatttgaagcacttgtagtaataaatgtatatattttattagcatttctataaatcaactctccatctaataccaatatattttcattttctaaatattccgcacatggtggaataactgcatctgcaaatggattgggattgcattgtgatttcctttgtttatttgttttcttactacctctacattttctatctttcttacatttacacttcttcatatgtatccctaattacaattaatataataatatagtatgaatcattattatattatgctcactaaaatcccacaaaattaattcataaaaactttatagttcaaagcaatgtagcatattcatataccaaagtaaaagatttaaaaaatagagaactaattcacgtgtgagattttgtaagttatgttataataagtattatacaggactataatctaatgaacaatggttagaaaaggcgaactaactaaaatagaaatgatatagagcaaaaaactaaaaggtggggtaaaatgaatgcatttttgacagtaataccattaatacttattaggtatgggattttaagtataatagacaaagaatcacttaaacgtgcgggtttctttgctccattaatcggaagagaaaaagtagcattctgggtttatcaaattacaaccgtacttattttactatacccactattactcaaaatcaaaactgactctgattggttttacataggtttaggagtatatagtttaggaattattttatatgctgtatctatagtaaattatgctaagcctaaaatgagtggaataaatttaaacggattataccgagtatcccgcaatcctatgtacattgcatattttatttattttttagggtgtgcattgctaacacattccttgatattacttgcgttattaatctgttttcaagtatccgcacactggattattctttcagaagaaagatggtgtattaagaaattcggagaagaatatataaaatatatgaataaagtgagacgttatatttagacagttatgatataactttattattcaagttatggtttgtgttcttcttatattattcaccaaagaaaatatttgtaatgtagtaaatatccaatattgagcattataggtggacaatccacctataattttcaagactatatttcaacattatattaaagcatagcctatttattaataatgaaatcctgttttttatccattcgactagcatacaatctaaaaatcctctactatgtaaactcccctatctatttttcatacattcttctattgcgtaatttttatcaagtgttataactccattatccaagataaaacatggtatccctattctcttttcatctttaacatcatcaaatagtgaattttcatcacgaattgcaacaaattcctttaacgcttttatatcttggcaaaaatctctataatcaaagctaatatttttttcttttaactcctctatagcctttaatgtagatggacacacattacttccataaatcttcataataaaacatcctttcatttgtatcttttgcttccttaaaaatatttttactgtggttcatgattcttcatatagataaaccaactgtaatctatacatatgcgtaacctcaccgaaatgaataacatacttttgttccagttagaggatatttcatagtctaagtatggttaatgattatgttctccatagagttcctcaatgagagtcgaactcatgtagatatcagccaaagtctaatatttattaaggcaatagctaaagaatttaatctcaatacttcaataattatttttttcaaaatagttatatttatactttttgataccataaatcaaatttgaagtatcaaaaagcttgtgaataatgtcaacttattatttgaccaatttaaaacatcagctgaatactataactctaattatcagatgtacttatttacaaagctgctaagactttaagttcgtatcttcactagaaatcataaatatatttgtaaccacaagggtcataatatggagaaaacatttgaaaatgagctgttaaaggttcttaagcagagaacccaaatctttgatttggtgagaatcgcttactcagtaaacgaacgtgagtcgagcttccctaggaaagttggagcatgctaaattggaacaacctactgcttagaaccttcagcgatattttcatagtttttcggaatcaaaatatttatgatttggtaagtagactagggaatcacttccctaacccctctcagaaccgtacgtgcggatttcccgcatacggctccccacattataattcacagtatatatgatatatcttcttttaagttgaaaatattaacatatattttagctttaggtattttgaagcactcaaacatagtgtcaaaacttctccagttataacttcttttctgacttcttttgtttagccatttaaaagttagttttcttactaaatatctgaaagttgcgagacttaaactgttgtcagtgattccgtaatacctataatatcctattagtctctgtgtcagtttctccattaataatgtgagcggcactgttctattattctttaaccattcattcaatctctttatgctagctccaaatttctttgagctagtcttcctcttaactctaaaacttccattctttctgcaactgcagaagtgtgtaaatcctagaaaatcaaaagttctatctttatatgattctaactttcatgctctcttgaattttctatcatagtaggcattcttaccgaaatataatattttagttttatcttcagctacctgcaagttaaatttgtctaatctgtttttcaatgcttcatagaaagctttcgcttcgtcttcatactgaaaacagcaaacaaaatcatccgcatagcgtactatgtacgcctgtcctttacacttctttttgataaagttattaaaccatatatctaaaacataatgtaaataaatgtttgctaatgttggagatattattcccccttgtggagttccttcatatactttataaaactttccgttttccattattccagttttcaaaaatctacctatatatctaagtaagttcttgtctgcaatcctgtgttcaagaaatttcatcaaccacttgtggtcaacattatcaaagaatcctttaatatcagcatctacaacataattcacattcttttcagataaatatacatttaagattttaagagcatcatgacaacttctattttgtctaaacccaaaagaactatcaatgaaatcttgttcatatattgattttaatattttattaatggctaattgtacaactttgtcttcatatgccggtatacctagaggtcttttcttgtttgaaccagacttatctatgtatactctccttacaggctgcggtctatatttaaaagtcttcattctaattagtagattatcaatattattctctaagttagtttcatattcttcctttgttaccttatccactcctgtagccttatttccgctcagttcataatggcataaaattagcatttccttgttaactaaatgcattagtgatgtaaatttctctttaggattatttccagctatttctgctatcctctcaagttttgtgtacatttttttttcctcctctgtgtgagaatttctgtttctcttttcaaggtctataatatgttacacccttccctccatggtcattactcatttcttcagtactatggtgtaatccgactactcattatcatttgaatacctctgatttctaatcattgttttccatactctgaagtcagagaataatgagtcctcccaagttgacgtactatatcaatgtataccatgctacaccttaaaaccacgagaaagcacagatattcttgcaataatgattatctatgttctgacttctaatttaccgatattatcgtcctttctgactttgtgataatttcgtggctagtagtttcagcattcgcttgcggcctggtaccttgtttgtctacacttaacttattacatcgccataataagcccaagactaactaatgactggttgctggcctttgtcatgcaggattcccacctgctatatagtaataatgaggaaggttagccctcattatcttttacgcccttgcttggcgtaccggtaagttaccacataaacccggttttagtcaggttatctatatgataaacagctaatgtagctttcttttaaaaatttaattttttaatttctgctgaaactgtggcatgctcttatacatgctcattaggctcactgcaaccaatagtatccatcctaatagtgatgaaaatgctagtaatataactaatattataataagcaatattattgatatttttaaaattataccatctatacattttagactagcaataagtccaagaagtgcattacatataaaaaaggtatttgcaattcctactgtccattctacagtaatataattgtagtgaataaggacaataagtatgcaatgaaatatagtcaatactaataaagctcttttaggagatctttcttcctctttctttattaaaaaagcaggaagcataccattttctgctcttgcagccatttgtcttgtaacagcacctaatatcataatcaatgtggcatagcacaatcctgctgccacaatacccataacaatataagataagttaccgaataaaggaataagaattaaacttacattaatgtctgtttcttttgtaataatttgatttcctaaactgttctgcaaagcaaaagtagtcaataaatatataaaaataacagctgataaacttattttcatagcacgcataagcgttttctctggattcatgacctcttcgacataacttccaatcacttcccatcctataattgcccaaaataatagcaaaagcgtagatccaagagttgtaattggtggcataccacttggaaaagttacattatcttgctttaaaagattaaaaacactgcctataataagaataagtccagtaagtgaagagagtactaaagtaacctttcccattgcagttattcccattaatagcacagctatattaagaaataataatataaaaattacaagagtcctataattatttgttcctggaaacatgttacaaataaatccagaagccgtatataaaacagccacaggtccaaagcagacagctgctgtcaaataattcgaagataattccctaaaattttgtccaagcttctcacctattaccacattcaccccttcattactcaaagttaatatgctcatttttgtaaatatgtaagcaaatataatacccataagcatagttattatccaagcaataattgctttgtctccaatcatatgaatcgcaataggtggtaaaagtacaatacctgaacctaaaattggacctatcatcagtccacttatagaaatagtatttagttttttattcatttttcccctccttggtgttgattatcttattataagaggggttaatccatttgtaaaattgaaattttaaatgcagcatatcaataattttgatgattaaagattttctatttaacaaaacaatccaagtgatcttagttatgcctaagattcacttggattgttaaacctatttatattttgaaatttaaaactagttcagttaatttttctgctgtttctgcttgatcttgagctactctagcaacctgttctattgctttattagtttcatctatacctactttaatttcctccgaactgtttttagtatctttcatattttcagcaatagtttgtacaacttcagaaatctcttctgtagatgcatttaactcctgtgacattgatgcaatattctgtgataaatcactaatatatgcagcatcattttcatatttatttcctgtctcaatcaataaatcataatcttttttaacattctcattaacaaaatgtagtacctcctttgaattgcctgatagattattaaaggcagcctgaacatttgaaactacattttgaatattcttaacataatctgctgattgctcagcaagtatccttacttcatttgcaactaccgcaaatccctttccttgttctccagcccttgcagcttcaatatttgcattcaaggctaataaatttgtctgttctgctattgatgctattgattgtgcaattatacctatttcactaactacttttccttgctctattgcattaagtatattattttgcttttcttcatacaattcatctgtagctttcatagagttaattccagtttcctttacttcagtagctctttctttaatttcgatagactgatgactactttcagttgaattcgaagccagctgagttattccagaattaacttcttccattgttgaagctaactcttctgtaattgaatttattccttgtatattttctactattccagatgtgttcttatctatgctttcaaaattgcttgataattcttctaatgtagcagataattcttcactagatgctgttactccctgagcctgaatcacaatattttcaatcactgatttgattttttcttttgcattatttaatgctctaattaacaatcctaattcatcattattttcactttctattgagtatgttaaatctccgtctcctaaagcttctgcaaataataaaacttttttaattatcatagatatatatattgataatcctgtccctatagcaatcgccaaaataatccctactattagaattgcatgcattatattagttgttttgcgataattttcttttgcactgctataagcttcatctgcttgtttttggtttatttcaaccaagttatcaagatgttttgatataatttctgtagtttggttaatttcagataatttaatttttgcttctgaataattcccatttttaagtaactcaaaaagattgtctttttcagttgcaaacttatctcctaaaatagaattaagatcatcaaactctttcttctcatcatttgacatgctgctattaccaaaagcttcaactacagctgaatttttagttttgatttgatcaagttgttgtagcgctgtttgtaccttggaattatcctgttctagaactacatcattaacaattttaatttcaattaaaaaattctctttaaccgaatgtatttcatcaatactttttaaatcatcagaatatatttgttctatactgctctcagtatttgatagaccaaactttccgaagaaaccagttataccaattagtataaccatactcataaagccaattaataattttgtttttatggatacattctttatcatcagtataccatctccctttataataaaaaattaaagtttataataatttgcagattattctaaacatttactagtttatattttatcaaaaattgttaaaatataatagcatttcgacataaatttttctagttatgacaattttattttttttatttatatatattgcaattcacaatgcacatttcacaattcacaattatggctaaaattcttgtaatatttttagaattatgatgaagaattatttttacaacatatatatatttttttattattatactactaatttagattataaatatttagtttttaaccatatatatttatacatttcctttttatacaaagtgcgcgtcatagagtgtagttatgcaatgttttatttttttcaattaaattaaataggctagttattcatttgcataactaaccttaaaattttactcatttatagaatttatattaatcctctctccaaattttgttagcgtgttttttattttgaaaaagtgaaagcttctataacagcagtttccttatcttctgttattgcacctccacatcttttttaaatgcatatctcttgttcggtttaattataggaaattattgttacagttctgtaacagagatttataaatagtgttacagatttatgaatgtttatcatattatataaataaatctaaaaattataatcacttcattttaattcatattaattctaatatagtcttatctgactacattagtttaaaatagtataattctctacaaaaattatactattagcactttatccaaattcatcaataataaaactggctagtttaagccttatgttatataaatattacatttatttttatattcttttaattaaattactttccttactaaatcttctttcatttgcagagtaatataaataatagaaccatgaattattttttgtctcatggttctatctaacaatttgtcattttatcttttctttagcctatagcctaaaaattatttgctctcattaacaatggcaatactgttacttgatcctattctgcttgctcctgcatttatcatgtccatagcagctttaaagtctctaactccacctgatgcctttacacctaaatccggtccaacagtctttctcattaaagcaatatcttccttagttgctccaccagtagaaaatcctgttgatgtcttagcaaaatcagctttagcttctttagctatttcgcaagctttaactttttcttcatcagttaataaacatgtttcaataataactttaactaatgcttttcctttagctgcattcactacagcttctatatcttcttttacaaatttataatccttggactttagtgcccctacatttataaccatatctatttcgctcgcaccattttcaatagcttgagatgtttcaaaagctttcgcttcctttgtcatagctccaagtggaaatcctactaccacacaagtttttacttcacttcctgcaagttcagtacttactaattttgcataacatccatttacacaaacagatgcaaagctatactcttttgcttctctgcaaagcctttttacatcctctactgttgcttctggttttaatattgtatgatctatatatttagctatattcatatttcattactccttaaatttattttataactatatatgttacaatgcacaatgcacaattcacaattacggttaaaattcttttaatttttttagaattatatcatgcagtttattttttagattgattaaataacaagttgatactagtgacaaattacaggtgacaagtgattcacttatcacttactcaaccaacgtatttgagtcgagtttccgctaacggtcggttcaattaacgcttgtgaagtgagagtccaaaattttatttttggttgtcgaacttcctcagcaaatgtaataagtcgagcttccataggaaattgggagcaaacattagtggtgcaacctaaaatttagaactttcagcgaaattttcgcagtcctgtgaaataacaatgtttcttctttttattaacgagtacctttttcgtatggaactccatcagcttttggtgcaactgattttccaacaaaaagaatcaatactacaattgttaaaatgtatggtagcattgcaagtatttgcgaaggaatagcaaaggttccaccgcctaatacaactgttaatgcttgagcaaatccaaataataagcaagctccgtatgcaccatgtggagtccatttaccaaaaataactgctgctaatgcaataaagccttgaccgctaattgctgttggcgtaaattgtgctattattgcaagagtcatagatgctccaccaaaccctgcaagtattccagaaatcataacacatacgtaacgagttctagttacacttattccaagagtatctgcagctgctggatgctctcctacagcacgaatacgtagtccccatttagttttatataaaataaaccaaatgactactgtaattaaaatcgctataaaaactgtaatatctactccaaatactttaggtaatttagtagctactggtttagtcatagtagctccttcaaataataacctacatgtaaataacgagaaacctgcacccaataaatttatagcaatacctgatattgtctgatcagcgttgaatgttatagatgcaactgcatgtaataaagccattattccacctgcaattcctgcagctaaaaatccaagccatgcatttccagaataatatcctaccgccgcaccagtaaatgcacctatagtcatcataccttcaatcccgatatttacaactccagaacgctcagaaacaactccacctaatgctccaaatattaacggtgctgaatacattagtgtaatacctattaatagtgcaatactatttaacattcttctcacctctctttaaaagtctgtcagctaaagcaggtacaatcttagttaatgctacgaaaaatacaatagtacctatcattatatttattatttctgatggtgcacctatagcagattgtacagattgacctccatatagtaatccaccatataacaatcctccaaatatacatccaataggtgaacttcctgcaattaatgcaactgataatccattaaatccgttattttcaaaagcagccatagttgatagcttatgaggtgctgtgcctgtgatagctaatgctccagcaagacctgataatgcacctgcaattaccattgattgaactatattacgattaacatttattccagcaaattctgctgcatctttatttaatccaactgcacgtaattcataaccctttgctgatttatataataaaactgatataactacagccattataatagcaacaataattccaatattaacatctgtttttaacaaaacttctgataaccatttgtgatgagaaaggaattccattccagcatcagatgtcttccaattgccaagtatagtagtaaatccagattcattaatcatataagtacttgttgaatctggttgatgaaatacatctgttgatacaacgaaattagataaatataatgcaatccaattcagcattatgctggttataacttcatgtattccgaatttcgccttaagaattcccacaataccaccaaacactgctccagcagctacaccagctaaaattactaaaggaatttctaatactgctggcaaatttaatttgattccaactattgttgatgcaattgtacctactatatattgaccttccgctccaatattaaataatcctgttttaaaagcaaatgcaacacttaaaccagttaaaataataggagtggccttaataattgtattagatatatatttaggttttgaaaaaatccctccaaaaagtgcactaaaagcatctataggattatagccagcaacacctagtactattgatgcaacaataaatccacagaatattgcaatgaatgttgaagtaactggttttttaagaatttttactactatcttcactatgtttacctcccgccattagcaagcctattgtattttcatcaacttcaccttgtttaaaagtacctacaatagttccttccgaaattacagctatagtatctgaaacattcataacttcatcaagttctaatgaaattaaaagaacagcttttcctttatctctttctcttattaatgttttatgaacatattcaattgctcctacatcaagtccacgagttggctgcactgcaattaataagtctggatcattatatacttctcttgcaattataactttttgctgatttccccctgatagccctctgataggtgatgattcacagttatcaggtcttatatcatactgatttataagctccttagtatgagccataattttatctttaaccaataatccattcttacaatatggttcacttttatatttttctattaccatattttcagcaacactaaaatctagtacaagcccacgtttttgcctgtcttcatgtattgttgaaactttatttttgataacgttttccactgtggtattttgtatctctactccatttattttaatggtacctttttcggatttagcaagacaagttatagcttcaattaattctttttgtccattgccgtcaattcctgcaataccaacgatttcacctttacgtactttaagtgataaatctttaactgcatctaactttctttcatctttaacagttaaattatctatttcaaaaacaacctcatctggttttgcagcttctttgtcaacgattaacttgactgcatgacctaccatcattgttgcaagatcttctcttgttacttccttaacatttaccgtatctatatattttcctctacgtattattgtacaaacatcagaagactcctttatttcttttaatttgtgtgtaattataattattgtttttccatcagcaataaggttatgcatgatgcctattaaatcttgaatttcttgtggagtaagaactgctgtcggctcgtccaatattaataaatcagctccacgatataaagcttttaatatttcaatacgctgctgcatacctactgaaatatcttcaatttttgcatctggatctacatctaatccatactttttaacaatgtttaatatttcttctcgggcttttttcatgtctaatattccacatttttttgtgatttcactacccaacactatattttgtgttactgtaaaattttcaactaacataaagtgttgatgaaccattcctattccattttcaatagctatattaggatttttaatatttatcttttcaccattaagatatatttcaccttgatcagcttgatacaatccataaaggatattcataagggtacttttgcctgcaccattttctcctagtagtgcatgaattgtaccttttttaatatcaaggttgatattatctaaagcacagaacgagccaaacgtttttgtaatcccacgcatttgtactgcatattgtttgctaatttccatacctaatcctcctctattatataaggctttgccggcaaaccgttaagttaccagcaaagcctacctccactactgtcttaatagttattatctactttaagtttaaattattatttttttaaaaagtcattataagtttgttcattgtaaggtggaactattgtaccatttttaatcttgtcttgaacttccatagttgctttatatactgctggatccatatttttgttttcagttggaattcctacagcattttcttttaatccataagtataagttttaccaccaattttgtttccactcatagcttctttagaaacattttcaactgcaacgcttgcaagttttaatgctgatgttaatacattatcaggagctaaatatgcttgatcacggtcaacacctattgcaaacttatttgcttctttagctgcttcaattacacctacacctacaccacctgctgcatggaatacgatatcgcatccagacgagaacatcttgtttgcaattgctttaccctttgatgcatcagaaaaactttcagcatattgaacatctacagtaatatctttacctaattcttttgctgcatattgaacaccagcttggtatccatattggaattgatctataattccactttttataccaccaacaaatccaactttacctgtttttgttgttttagcagctgcataacctaccataaatgaaggttcttgcgcattaaacataacgcctgtaacattagctggagtatcatctccatatgaattatcaactatagcataactaacatctggatttgctttggctgcctttgttattgcatctgacattgcaaaaccaataccccaaactactttattaccagcatcaacagctttatctaggtttgtagcataatctgattcttgcttagattcaagatagcttactttacctccagcattattcttttcaaaattttgcaatccttcccatgaagattgattgaaagattggtcatttacaccacctgtatcagttaccattgcaactttaaattctttattaccatcagtggttcctttatcagttgtcttgtttccacttgatccgcaaccagccatagttcccataatcattgttgtcattaataatgcaattacttttttcatgatacttcctcctataaactttattattttgctatttcaagagcaattttcatcatttctgtaaaacttaattgtctatcttctgctgaaagtgattctcctgttaatactgagtctgaaattgtaagtaaacataatgcattctttcctgcttctgcagcattcatataaagtgcagctgcttccatttctattgctaggactcccatgctcttccacttttctgttgctgttttatcagcactataaaaagtatcagaagataatatgtttcctacaacaacatttatattgttttcttttgctgcttcaactgcactgctaactaaatcaaaacttgcaattggagcaaaagttcctggtaaattgtattggtgtgcgtagttagaattagtagatgcacctaaaccgattacaacatcacgtaggtgcaatttctcagatatacttcctgctgttccaattctaataatattatctacaccataaaaattaaataattcatagctataaatacctatagatggcattcccatgccgcctcccataactgagacacgctttcctttataagttccagtatacccaagcatatttcttactgtattaaattgagtaacatcttcaagaaagttttctgcaataaatttagctcttaaagggtctcctggcattaatactgtttttgctatttctcctagctttgccccattatggggagttggtacatttgtcataattctgtcctccaaaatcttgtttttaatattgtaaaatgttcttttcacctattttaatcttcattagaactgactttttaaatagctctgatgcaaattgtatacaaggccctcctattagggctgcaataactgttacagcccctgcttttcctcctagtataaaaccaattataagcgatgtaacatcacaaattatctttgccgttctatattgagatttcattttgtcttttaatatcatagctaaacttgtaaaaggatctaatccaatatttattgctataaagattcctaatcctgtaaatagcattaaggatccacatacagaacttaatattctccactctaaaacattaggcaaattcatatattgataaaaccttgagcctattccaacgaaggttcccattggaatagtatatataaatgttcctatatttatatactttctattgattaataacgataatattattattgcgtaatttaccacatttgttgtcattccaagttcactttgtggaagaccacttgcactgcgaactccatcatatagaattgcaactgcatcatttccaagcattgcagctgaattaaatgcaattccaaatcctacaagagcaactccaactaacgctattaaaatatttataagaagaactttaagtgatttttcctttagcgcattaactgtactcatcattagttaaatatccttcctgtaatactatactaacttacttagtactgattcaccaattgtattctcaggcatctttactccaaagttttctgctattgtagcaccaattgctgcaaaactatcgcttgtttccattaatccactttcagtcatagatggcgaataagctaagaaaggaacatgttcacgtgtatgatcagtacctttataagttggatcattaccatggtctgctgtaattattaataaatcatcttcttttaatttatctaatacttttcctaaattaacatcaaacttttctaattcttcagcataaccaactggatttcttctgtgtccccataaagcatcaaagtctactaaattaacaaagcacgatcctttaaattctttatccattatttctaaagtttgttccattccatgaacagaactttttgatttatttgattctgttataccttcaccatcaaatatatcatttatttttccaacggatattgaagcaaatccattatcttttaatgcatttaatgcagttgctccatatggttttaaagcataatcatgtctattacttgtacgtttgaattcaccttttttcattcctaaatatggtcttgctataactcttccaactttccattcatctttaagagttaattctcttgcaatttcacagcaacgataaagttcatctaacccaaaagtttcttcatgaccacatatttgtaaaacagaatcagctgaagtataaacgatcatatctcctgtttttatttgatgttcgccaagttcatctaatatttctgttccactagcacttttatttccaactattttatgacctgttcttttttcaagttcatctaatagctcttgtggaaaacctgtatcagtaaatgtttggaatggtgtttctatttttagccccatcatttcccagtggccagtcattgtatcttttccaacacttgcttctctcatcttcataaaatgagctaaaggtttttcaactgcttcaacatgtttgattggatgtaaattagctagccctaacttttgtaagtttggaatcttaaattcatctaccgactctgatatatgcctaagtgtatctacattaacatcaccatactcttttgaatcactcatttctccaattccaagtgaatctattactattgtgaaaattctattatatttcttcataactccatcctttcaaaactaattaagtttatatttcattttatatttaatacttattccaaaagtaaaattttattattttagatcttcctctgtaaaggacattggtaataattcttcgatatcagtaattttttcagtctttttattagataaaactattggagtatgtttttctaacaattcaactaaaacttgcctgcatgcaccacaaggagttgctagcgtatttccatcacttacaatggcaattgcttttacatcctctttacgatacccatttgaatatgcttgaaagattgcatttctctctgcacaatttgttaaaccataagatgcattttcaatgtttgctcctataaagtatttattatctttagtaacaacacaagaaccaaccttgtaatttgaataaggagaatatgcattttccatagctttaaaagctctttctaaaatatcttcatactctttcatttcatattcctttccgaaagatcaaacactttcttatttagtttctctctctttgtcagcttttattaattttctaattccttcaattgcaacttctatagctgtttctgtatcatgcacttgtagattttcaagtcctgccttttcacgttcttgatttgcaacaactagaaatactgaacctactcttacttttaaatagcttcctactacaaataaagctgctgattccatttcagaagcaaggcatccgcatttcatccacgcatcccacttgtttaaaagatcataacttactggtttagtttctggcgaatgttgaccataaaatgaatctttacattgaactactccaacatgataatttttatttaaatctttagatgcttgcacaagtaggcttgcaacatcgaagtttgcaatagctggaaattcaattggtgcatattctttactagtaccttctgctctaattgcaccagtagcaataactacatcgccacctttaacatttatatccattccgccacatgtaccaactcttacgaaagtatctgctccgcaatttactaattcttctaatgctatagcagctgatggtccaccaattcctgttgaagtaacacttacttttacaccatctaaaaatccagtgtaagtaacatactctctattatcagcaattaattttggatcatcaaagtatgcagcaatctttttacatctctttggatcccctggtaatattacgtatttacctacatctccttctctcacatctatatgatattgtttcccagaaccttgtgaataattcattataatacctccatttatttcacgattcgctttcagaatacggtttcaacattacgttaaaaaatgttggacatccctaatacttgtctattaagttgtattattgtttgtactcaaagaatagcatgtctgttatttcatgtcaagcattttattcatggtaaattccgaaaattcattcaatttaaaaactatgccaaaagcctgttggtacaagctttcagaaggacaggctgtgcacaaaataactataataatttaattgccaatattgtttaattgacgttataattaagtataaaacaaatatttcagttgaaaatttgtaattcaatatgtatacttgtctagacagggttatatctgtagaaaggtgatatttttatgaatgatgaatttgatatagttgaaaagccaaaagaattaagatacgtaagtgtatataatcaactttttaaaatgataaatgaaggtacttttccagaaggaagtagattaccctctgaacctgaactatctaaattaattggtgttagtagaactacgctaagacaggcacttgcactactacaagacgatggattagtaaataatataagaggtaagggaaattttatagtaaaatctaaacctaaaaaagatcttggtttagaaacaatgggacaccctgtatacaagtgcataaatgatgtcattgatgaagttaaaattcaattaagaatagagccatctactgactattttaatcaaattcttgtaaagaaaactgctgctgtagtattaatagatagatggtataaatctgaaggtcaagctatagcttatacgtttactttattgccaattgaaactatttcaaaatttaatcttgatttaaacaatgaggatatgattttagaatttctagaaagagatatttacgaaatatctagtgatatattagttgaaataaagtattcaacttctggaaactttgctgctaaaacgtatccaatttcgccagaaaatcaatttcatcttatacaggaaactctttataaagattcagaatttcctattgcttctaataagcattatttaccgataaaaacaagttcaattaagtttcatcctaaaaagcaataggttaattatatataccccaactttaaattcggacttatgcgataatccaccgaaagcagaaacattgttatttcgcaggactatgaaaatttcgctgaaagtgctaaattgcaggttgcacccactaacgcttgctcccaattttattgtgacaagcattagttgaacaacctacaattaagtacttttgccagctcattttcaatgcctgctgcataaaaatgtttctgctttcttatatggtgctttatcgcaaagtataaatcaaatccttaagttgtttatctataattatgaatagtatcatttgcaatacaagcaaaattaatataattcttgctatttagttgcttgcattggaaatcattcagtatatatgttgaaataatgaactcacattaaaattctagtaaatcaagtgtttaagcaagattaaatcgtgtaagcttaattgcaatataataattacaaagtattatttgttttgtaattattgtatgttaatatcacaggccatatgcttcaggaattaaaataagaatgatttactaaaattaataaatcattctaagttcgtggtgaaatttatttaataaggagaaataatatttcaactacactatattatatattatagaataagcgcttaaatcgtgttaaaaatcaaaaaacttattttgagcatattaatgttctacatagggatttaaaaaatagagaccccttgtatacatagtatgtgttatattttgcaagttatgttataataagtgttattaaaaactgtaatctaatgaacaatagttaattattctgtatttataggatggagaatatatatgggaatacaagtattaatagcatgtattgcaactattgcagttgttatatttcaagtagtttttacgatgtgggaatctaatccttataaaaagatttattataaacttcttttagaattaagtaaagctcctaatgatcctgaattgaaggaaagaactatggaagcaggaaatcaatattatagtagaataaaatcttactcaatcggaagttttagaggtgctgtagcttctgcaagggtaaagacgttaataggtccaatagatgaaaagatattatttgaagatatgactagaatagttgagatagataggaattaatatgaaacattaatttatgaattagccaaaaaactaataaacaatgttgttatattaagtatcacaggtgggcaatcccacctataatttttataacgctacatttcaacactatattaaagcatagcattttacaaaaatactgtgataagtgagattgctgaaactatttggattaaggcaattgctatagcataaagtgaagctttctttcctattcttataagttgtctaaaattcaccctcatccctattccagcaagagcaattacttcaaagttactacttattaatttaaatatattagaaatattcattggaaaaactccagcagtaaatgctaaacacataaggaaaaaggtcaatacataccaaggtatttttatttttgaatttaattttccgctttctactctaccagatttatttttcatttttcctaatattaatacaacaacaactagaaatattattcttactattttaaatattgtagataaatccttaacttgttcatttactagacttgcacttccaacaacttgtcctacagattgaagtattcctcctattaaagcggaggtttttattgtctctaatgaaaatatcactttagctataaatggaagaacaagcatcaatactgttcctgtaacatttactatagttattgctatgcctttttcactatcccctgctcctattactggtgcagtagctgctatggctgaagatccacaaactgcatttccacttgccattaaaaaactaaaattctctgagaatttaagctttttcccaattaaaattacaagtgctatagtaatactcatttgaaatactataaatgaaattcctgaaaaacctaattttaatatagtttgaattcccaatgttccgcctaacagaactatagaatatgacaatagttcactttccgcgaattttgatcccttttgatatatttttctattacaaaatgtatttcctgctgccatcccaatgaatattgctagagatgccgcccctatgctaggtacataattacttaaatactttgcgataaatgcgattattgtacatattataactcctggtaaaacttctaaaaccttatccattcctcttgataatttcctatctttaattatatttaaactcattcatatcaccttctaaaatatttatctgaatatgaagtacttctttttctatttttagtatattaggtgtataatcataagtaaaatatatatattctataataatgattaagaatattaatgattaagaaaggatgatcctatgcttgatgaattaaaaacttttatagcagttgttgaatataaaaacttcactaaagctgctgaatccattaatctatcccaacctagtgtaagtttacatattaagcaccttgaggagtattttaatacaactttaattcaacgttcaataaagcagaaaaatataaatataactcaatctggttttttactttatgagcgttcaaaacaaatgattaagctactaaatgatactaaaaatgatctattaggttatggaaatgttgtaaaaggtcagctgcatataggggctagttttactataggagaatacttactaccagcctttttaggaaaatttgcaaaggcctatcctgagttagaattagaagtgacaattgaaaacacacataacatatgcgaaaaagttaagaattttcaagtcgacattgctctagttgaaggcactgttcctccttcccactttacgatcgaaaaattttatactgacaaaatggaagttgctgttccttacaatcactacttagttaataactatttttcagctgaggatctgcaaaatcagacttggattagtagagagataggatctggtactaggcaatatttgaatctcttcttatcaaataataatattaacgctaaaaatatcattgtttttggaagtaattattctgtaaaagaagctgtaaaaaacaatttaggaataacctttatttcttcacttgtaattgagaattctttaaaaaacaatgaaatttccactttaaaaaccaaacaaacttacactcgtccattttcatatgtaatgcaaaaaggtataatcccctcaaaaggaacattggcctttatagatatgctaaaaagctatgtagaaaatctataaaaatagaaaaataaagaacaataatttgagatttatgtgataatctaccgaaatcataaatattttgattccgaaaagctatgaaaatatatttatgatttctagttaagatatgagcttaacattctagtaagtttaggaaggagctgtaaccgagaaaaaagaaaacgccaaactacagagggaaaattaatgggatactctctttccccccacaatttggtgattactggttaagctttacgcgtatgatttgatatctatatagataagccaattataagttagatttatactatgaaatatatcccaactagaaatgggtaatatatttttgtgaaattacccagaaactggaacaaaagtatattattcatttcggcgagttatatgcataagttcaggtcttagttgggttatctataattgcttaacctatgttttttagaaatgttttataatcctcatagtttctttttaaaagatttggagtatcaagaccataagggcaatgagccttacagttaccacactctatacaatcttcaatctttttcatcttagcttgcccttcctctgaaagatgcccttcagttggagatctacgaagaagtaaggacattcttgcacaattattaatttctattcctgctggacatggcatgcaatatccgcaaccacgacaaaactcacctacaagctcttttctctcattttcaataaattctttaatttcctctgtcattgcagggggattgtctatatatgatataaattcatctaattcattttctctttgaactccccagataggtaaagtattatcaaattgagaaaggtatgcgtaagctgcatcacttcttgctataagcccacctgataatgccttcatgcagatatagccaacattcttctctttacataaatttactagatcctcatcctttttatcagcaagatagctaaatgggaactgtaatgtatcataaagacctgattcaacagcttctatagccactggtaatctatgatttgtaattcctatgaaacgaatctttccttgtttttttgcttctagcatagcctcatatagacctgtcccatcattaggtttaggacaaaaacttggattatggaactgataaatatctatataatctgttttaagcatagcaagactcttttctaaatcactccaaaaaccttcaacagtagttgatggtgttttcgttgcaataattattttatctctaacatcacttaaagcaagaccaattttatactcgctgtcagtgtaacttcttgctgagtcaaaaaaattaataccattgtcgtaagctttcctcaacaattttactgcttcttcgttagagacacgctgaacagggagagcaccaaatccatttctatttactactatcccagttcttcctagcgtaacatttaccatattatcatcgcctttctcgcaattccataaatatattggttatattaacctatttacttgatattatatcacctagagttaacttcaagtcaagaataaaacctaagtaaatatctgagttaaaataatgtatgcctatttcaatttcacctttagtaaattaattattattgaaacattggcccggtatatggttcatatggaagtaaaactgccactcctgtttcatctgatttataggataccccttcaagaggatttctatctttaactaaattcattcctacggtatatattgtattagtcatatcagctgtttcttgtgaagcagtacccaacatgaagccttttgaaaccagttctttagcttcagatactccatctagaccaacaactatgattgactgagatttattcccagtattgtagccatatttttgcaatgcttgaacagcgccaattgccatagagtcatcatttgaaattatcgcttctattttgttaccaaatctcaaaaacaacgcatcaacggcatctttagcagacgctgtatcccaattcaaaataggagatgcaagttgttcggtttttataaaagcttcgttaatagttgaaacagagtatgctgacctatcaatggaagttttattaagtttttcaccaactagtaatacgtattgtaacgtgtcatctttatttttatcaattaattgtttatgattcctccaagcatcggcaatcattttcccttgtaaagtgccgccttgtgctgaatctgttcctacataaaaagcttttttatatgatttaattgcctccattgaaaatggtactctattaaaaactactactgggatgttaaattgtgaaattctgttaatcatttctcgtatttcaagtagattaaccatatctaataatataagatcaatacccttgtgaagtgcattttcaatatctgtgttttgcgttgattgattaaaattggcattataaaaagagaatgaaacttctcctggattattcttttgtatatcttcaaaatttttgcgaaggagtacaatgtaatcatcattaagatctcttgtaaataagcctactctaacaggagagccttgacgatagtttgtgctggcattcgtagtcatatatgagttatttccaagcattataaccaatataattgcaagtaaagctatacttaatattctcttaaatgcttccatttaaatcctccttgccatttgttatataattttagtatgtctttataaaaaaaagtttatgctatttaatgttgatttgtagtgcaagagttggtggtaatagttatctattatctgaagcatttattaaaggagcaatacaatcaggtcattaagtagtcaaatatgaagtttgaaagaaaaaaataatttgatatttacacctgctaattattttttcatctcatgcaatgggttactatagctaaactacatttgcttataataaaaaacagtttcgtgtaaattaccattatcagatcttgcatatttaggtattcgtcccacctcgatgtagccaatagacttatatagcaagtttgaaggatcacctgctcttgtatctaatgtgataagacttcgctgttcagcctttgcttttttctctgcattctccattaagcacttgcctaatccttctcttctggaatcagaatgtaccataagttttgcaatttctgcacgatgtgttccattttgtttttgacataaatgtaattgcacagtaccaagtatccttcctcttacctttgcaatccaaagtacaactcctgtcgtcaatgcttctctccaatatttttttgcatcttctaaacttaatggtggtaaaaaaccaactgatgcacctccttcaactacgtttataagtagaagtgagagctcctgcaaaatatcatctgaaatttgtgttatttccgtaatttcaaaatttttattcataatcaatctcccttttagttttttaactattataatatacccatattatatagatataaagcaaaacttaccatatcattgttatatggtaagtttgtagaattctcatttcatcttatcttacaaaaatgtatatactctaatttaatcttcataaaggtgtttattagtatttatataattttctccccagatgttcatagaatccaaaactggctttaagctcttccctagttctgaaagtgagtattcaaccctaggtggcacttcaggatatacctttctaataattaatccatcagcttccatttgtcgaagctgctgtgttaacattttttgacttatcccattaattccattctcaagttggttaaatctttgcgttccatcatcatgtaaatttcttaaaataagaactttccacttgtgtccaataagtttaacagtctcttcaattggacataacttaccacatgtcatcagcattcactcctatcatatataaattgatacttactatttagttcgtaccatacaaaatagtgccttcttgtaaaaagttaatagtgattatattataataccataagtcaacaaagcatgggaggaaatctattatgaaaaaatcaaatgtgtctttaccataaaatagaattttaataattagcttaaataaatattataaattaaggagacgtataactatgaaaattttgaacattaacgatattacagaaaaaatcaaaaggaaagcactgtttacagagggcacaatggactcaggtattttattctacgaacctggtgaaacaatgactcctcacaaacattcagatttagatgaaatattctatgtaattagcggcaaaggaataataactataaatggcgaggatttttcaattaaagagaatgatgtaatgttatctccacatgaagaaagccatggtttcacaaataatggagatgaaaaattagtaatcttacaaataaaaaacaccattatgaagtaattgcaatatctataatcattagaataaaagatttagaagcttttattctaatgattactatttcaaaacatataagaaaggatgtattattatatgtactatatatctatgataatcacagttttagcaactgtaatatataatatcagtcaaaaatctatcaatcaatcaacaaatccatttatatcaatgatagtcacatatgttaccgcaataatattctctatattagcattaatcattttgcccatagaccgcaatattataagctctctaaaacaattaaattgggcaagttatgtattagggatatctgcattaggcctggaaataggatatttatatatctatagaagtggatggaatatagccgttgctcctctttttgtaagtataatttcaacaataatattaattgtagttggtattttcgtttataaaaccaaactatcccctatgaatgctctaggaatatgtttaagtatagttggattaattctaatgaataaaaagtaaaagacagtcctgaaatattaaatgaattaataaattaatggataattttcacttaaaaaaagtacttattttatgacaataagtactttttcttaactccatattcccaattgttgcagtgaaaagtagctatcttacccactttaagcaaccttttattgaattgagttcataagctcaaagaaatattttgactcttgagttttataaagattgtaccaagaatctagggtttgcggagagaatacatctagaattttcaatatatgcaaagcaaattcaagaggagctattccagaagcagtaatcaaactcccatcagttactacacattcttgctcataatacatttctccatcatagtttggacagaccattttaagataccctaggtcattgcttgtatgatctcgtttatctagtactccgcccatagcaagtcctattgtagcaccacaaattgcccctacaacaatacctttctctaaatatttttcagccattcttataattggagcatgaattgcttctgtccacgtattcccaccaggtagaatcaaagcagcagtatcatgagtactacactcctcaagttcaatttctggcaatattgtaagacctcccattgtagtaataggggccttggtaattcctacagtcactacttttagcggcattaatccctttttgtagtaccttcccgaattgatttcagcgattaaataacctatttcccagtctgccattgtatcaaatacataaagatatactgtattcttcattttctattcctccacattcattttatctgatatctagaaactatcaaaaagttaattcattataaatcttcttattgaattaaatatttttaacttaagttcatcatctttcttagcttcatcaaatactgcgcctaaatcattcttatcatatagctcactataatttaattttaagtatttctctactgaatttattaaatttatatctaattctttgtcttttattaccataattatcattccttttatcacaatatttattagcaaaaaatgaacttcattatattttaaatagtatccacttacacccttctatatgatacttaagctcaaatattttttccatttcttaaataaaatccaccaactatacaaacatacgttctctttaatatattatattgaaactgcgttcttttgtaaagaaaattttccctttacttttcctatataattatctattttctttaaattcctatgtttttagccataaaatatatcattgcataatgcaaattgtcgaaatgaaatgatcgcaattagtataaaaaaatcaacagccataataactcctaatttataaatttaattatcttttttattagttttcttaaggaatgttatttatttttaatgccatactaaatatgaaagatgcctttgaaatgaaagatataatttaattccatttaagactgatttcagaattgtaagcgttggtgatggtgatgtataccattaaacctagtacactagatggaggattataatgtggatattaaagaaagtattagctatgctactgttaataaatattacagtaaagttcactgaaattagcacgttttatagtctaaatttaaataataaaaatacaaccaatattgctgtgttattatatacgtttgatccatttatgtcatcacttaaacaaagcttagaaaccattcaaaaggataattctgataaaatcaaatttactttttttgatggaaaaaacaatatagcgctccaaaatgagacaatagattccatttctaaaaatgatttcgatttaattttggcaaacttagctgatacaagtgaaaacttcgttgaagatattatttttaatgttagatcaaaaaatcttccaatagtttttttagatatagatccgaaagtagtgtctaaagtttctaaatattatgataaagctgcttttatacttgcaaattctgatttagctgggactgttcaaggcaaaattctcgttaatctatggaattctaataagagttcactagataaaaataatgataacactttacaatatgttctattgcatggtcaagctaaagatccagtcacaatcgacagaacaaaatatgctatttcaacaattagtaattcagggataaacacagaacaattagcattggtaaatgctaattggcttaagagcttatctaaagattctatcgaatccttatttcttagatatgatggtaggattgaggcaataatttcaaataatgatgctatggcaataggggcagttgaggcacttcaaaaatatggctataataagggcgaaaaatcaaaaaatatagctatcgttggaattgatggaattccagaggcaaaatctttaattgataagggctttatggctggtactgttattcaagaccctaaagttttagcagaagtattctataatgttggaatgaatttggttaacaatttaagccctatagaaaatactaactataatgttgttgatggagaaatcatagttccttttccttatgaggagtatataaaaaaataaagggcacagaatttgtaaatacttttgtgtaaacttcaaaaagtaatatgattatttggcaaggttggaggtaaagtcaaaatttccaaccttatcctcctaatgaagtttgcacagaatattttacactctctttaatgttaaatatatataattacaaaaattccagttcactaaaggcttttataaattcctttactccataattttcaaattccacttcactcatcatatcatcttcttttgggacttttcctgttccgtacttcttgtgacttacttgtttaattgatgtctcatttatttcttcaactactggtaattccactgtttcagtaaccgaaacttcttctttctttccttgagcttttgcctcttgaatttgttttttaagttcttgaagatttacattattacttttaaccttatcgttttagtaatatttcccttcttaattcttagattgaattaaaatttttcattcaaatcgcctccatatactccttttatttccatgattatcctccctaattaaacataagtgaatgaatataatttattgacttatgttcattcatgttgtattattattttaacatagaaagaaggtgaaaatatggatcgtatttctaagccaccagaaatcagaaaacaagaaatattagatactgctatgaagcttttttatgaaaaaggttatgaagcaacatcaatggcagatattgcaaaagagcttaatatagttcaagggctttgctatcgttattttaaatcaaaacaaatattatttgagacggcaatgaatcagtacgtagagatatgctgtgcaaaatttgttcaaaacatccatgatcatagcagatcaattaatgaaagattaaatattatggaagagttaatgattaacgcagaaaataaaggtgaatatcgtgaattttatcacaaacctggtaacgaagcaatgcatgaaatgctgtcttttaaaatgtgtaaatatatgcttccacatattaaggaagaaattaaatatcttaaaaatactggtgttatttctattgaagaccctgaacttgcagcagagttcatatcatacggccaaataggattactgcaaaataaaagtgaaccattttcagtaataactcagcaaattaaaaaatatgtaaatgatatattaaaatttgaagacaaataataaatatgtttttattagccctgaggaaaaaaatttactcagggccttaaaaaaaatatttagtgaactgaattcaatgaacattattcattaagaaaggaagtaaatgttatgaaaggattaaaaaaaataaattttttagaaggagatgttaaaaataacttattaaccctatttatacctctattaatatcattttttctaagtatggcctttgatattaatgatagtatatggattggaaatattcttggaaaaaatgcacttgctgctcaaactgtttctatgcctctaattttactttataactctatatgtatgggggtaactggaggaataggaattttagtatctcaggcaattggtagtaaaaataatgaaaaatgtgcaaaaattatttcaacctcttttgtcatggtattagttttatctttagtaattactgtcatctgtgaactagggattaacactattttattttctgtagatacaccagcatctatttatgatgacgcaaaaagctttcttcaaattcatatcttaagttttgtttttatgatgattttttcatatttcgcagctgtcatgcgtagttatggaaattctatattccaacttatttcaataataatctgtaccttacttaatgctgtattggatcctatatttatatatttctatggattaaatggtgttgcagcggctacagtattagctgaatgtattttgataataatcgtatatgtttattactgtaaaaataaatttatcaatataaaaccaagtctatttgattctcaaatattaaaatctataatatcaaaagctgttccttcaatgtttcaacaaagtcttcccgcaataagcacaacatttgtaactacatttactgctggatttggtataaccgctattgcaggccttggaacagcaacaaagattgaaactttactcctatatccttcaatggccatgaatatggcaatttcagcagccgccggccaatgttttggtggacatgatgtaaaaaaagccagagaatattctaaatgggggataatattaggtggtggtcttgtttccgtatttaccttgcttgtaatattgttttcaaaatatttatcttttatttttggggcagatattcaggtaagtgaaatagtatcttcatattttattattattagtataggttatgtttgtaatatgattacaaattctatgcttggtgcaataaatggttttggaaaacctgcttcagctatgtatttaatgattttttattatattatagttagaattccgttagcaaagcttttatcaactacaagtctcggacttaatggtctatggtttgctgttttaatcagtcatattgccgctgctatagcttctgtgctattttataaacaaattactaaggctaaaattagagaagaagcatcattaaaacaaatgatttaaaaagaaaagtaaataccttccatccctgtcaagtagatagggcgaataatataaaattttattattttaactgtctactatagagggagcatatcatataattacagacttgggtatcttgatatattttatataaataggtactcaaatcttacatttacaaatatgaaaaaaccatttctttaccttctaatatgccaagactctatcgcaaaataggcaaccaagttaagaaaagagagatctcaaaggagcaagtttgcattgctaatgctattgataagcaaggtaatttaatcatggaattagcatgtaaaggtagaattacttctaaggaattagaaaaattatatgatggacatgtcacaaatggttctatactttgtactgatagtcataaaagttatattaattttacaaatggtttatcattagaacacaaacgtataaaaagaggtaaatataaagaaggattatatcatatttaacacattaatactctacatagcaatttaaagaaatgtatgaataggtttaatggtgttgcaacaaaatatattagtaactatatcaagtggttcaaatggcttcaaatattttatacagataaatagacaatgaagtctaaaaactttatagttcaaagtaatgtagtatattcatacatagaagtaaaagatttaaaaaatagagaccccgcctatgtatagtaaattatatattttataaattatgttataataagtattacacaaaactataatctaaataaacaataactttatattataatttaaggagatagcatatgaaacaagaaaacatatttacaaaatgttctatatgtattttaatagtatcatttttagtattagcaaatgaatttattcaactaatacctactcattctacgcgcttaaaaaggtttttattatattacgaaccatctatatttgaaattatcggtggaatactttcaatagttggattaattaaacataaaacaaaattagggttgttgttaatagcaattaattttatattatgttttgggccagtatttctttggagtttaccaacttctatttggggattatagaaattcataaatgtaatatatatgtaaaaatatagatggacaatcccacctatattttttgtcttaatttcaacactatattaaaacatacatgaaactattcctaaaatttaatggcttctgatgagaataataattaaattgattagttttaacgctcacaacaacaagactacataaactattactagatctaagcctcatggctacactttctgtgagagataataatattttaaacgcttcatccatagtttctacatcataagcaatagttgttgaatttcctattcctttaacctctaaataattagaatctcttacttctgaattatcgattccattagcatattcatatataaattttccatgagaatgcaatttacttattaataaatttacatcagtatttgctagttcccctattgtattagtattttttaacccatctttatctataggttaatttaaattattaattatatttcattttttcatttacatactcattaataatttttctatgattaacatcaatatcaataaattttagagcagttttaaaatttgtatccccttcattagattccgatctaacaacagaacatacagaagatatattttctttaattttaaaagaaagaaaaagtaatttcccgctttcaattttttcataagttataagtgctaaaccacctgcgctaatatcgacagtaaacgtctttttcttcattcgttgatgtccttgagtaactttatctaactcttctatcttgtccggtaaaaagaaatactcaacatctaagattgcacgtattcgtagtgattttcttcgctctattctattaatgacttttggttcttctaaaatcattaactgagaataatcatctgacttgcatccaataaccctagagttacaccaataggcttcttcttcaaatacaataaaaaaacttgcaatttcacttacactaaagattttaaggttattttgcaaattagaaatcattactccaatgaatttgtcccatttttttataatttttcccgaaaaaaatattttatcattcataaaatgaatttctttgtccatttttaaatccataatttgaaaatcattcatattgttactacacctcaacatccgcaaatagcctttttttatgttattctctaattacatttataatagttatttattgttaagaatatcataagagtgttaaggcaatattatgccaaagataaaagagtgcttattctgtttagtgttattcaaccatttaacttatttatttaaaagtgctttatttattcatatataaccattcttctttaatatgaacattttctttgaaatcataatatactaattattataatatactaattagtatattaactattttttccgtgcctcattaaatttaataatcgaaataagtcctatgtctattattacttttataattagtttctctaatattatacaaactaaaataacaaaaagcagtagccggattgctcctaccactgcttttaatattattttccaagagatattctatttttatataatcttcatttatttgaattatctataaatcactaatttattaattaacaacattcaattttatctatacatccagcaattttttcttttacttgcttacatccatcctttgatcctttgtcatatccttcacagtatccctctttatatccatctttgcgacctgcacgataagcttcttctaatgcagctcctgtagggtaatttcttttatagcaatcttttttattttttttatctttttcttcatcttcacaaccacattttttagtagaatcgtcttcctcttcttcgtaagattctaaatacttttcataatctttgtatcccattttcttttctcctttgttatttatttattataaattcttaaccaactgatttataatattataatatgctaattcacataatttgttattaattcaagaaaatttttttaaatatttattgaattttattagtaatagttctacttaatactgaataacactcaccatttttgaactgacttactatcatttccgataaataaaaaatagctttctttataacattataagtatagaatccaaatctatgctttggtgtgagtcacacttactcagtaaactaatgtgagtcgaacttcttttcttttactctataactttccaattcaacttcaatcatcatatcatcttcttagttaaaaatcccaccatgaagaaaacggaacatctatatttgaatctaatagcactgttttgccgattttaggggctattaaactaatctctgactttttggcctcctttaaggctcgttctattggttctttccaaccatgataggctaaggtaaatgcactccaatgcattaacatcatattcctaccctttacatctaagtgagcatgaacggcttcttctggtttcatatgcgcccaaaaccaacgtctgtcatattgagctccctcaatcaaagtaatatcaaaaggaccatatttttctcctattttcttaaaatgtgaatcatatcctccatcaccactataatataaatttatgttttttccgataattgcatatcctccccatagagttgcatctgagccaaatattcctctttttgaaaaatgtcttgatggtgttaatgcaattgttaaaccttgataattcatttcatcccaccaattaagctctgtaattttttccttagaaataccccatcgcattaaatgagaacttacccctagaggaacaaagaaatgtgatactttactgcttagttttacaatagatttataatctaaatgatcataatggtcatgtgatataaagattgcatcaataggtggaattttatcaataatatccaaaatattttcactatatttatattttttacttcccgcaaatgaaactggtgatgcaatggtacttaaaattgggtctaacagcagttttttattatcgatgctaagtaaaaatgatgagtgaccaagccaagtcaaactatctttttcgcttttgatcttttcccaatcaattgattccacaggaatttcaccatgaggctttcgattttcagcgcctgtaatcgaatctttaagcattgataaaatatctgaagcactcatgcccaaacttgttggagtttcattaacaaattttccattaacataattattgaaattcttataaaattctatttgttcttttgtaggttttccaccgaaagctgggttcaattttataaacgctgtaataacaacacataataaaattataaaactaaatatatatataatcatttttgttcctcctatatcttcatttgttcaaattacttcattaattagtttatcatatttaaaatgttgtttttatttactaattatcttttgcacattacctatataagaaaaatatctacaaaaactccaactcactaaaagccttcacaaattcttttactccataattctcaaattctacttcaatcatcatatcatcttcttttaggacttttcctgttccgtatttcttgtggcttacctttttagttgatgtttcacttatttcttcaactactggtaattccactgcttcagtaactgaaacttcctctttctttcccttagcctttgcctcttgaatttgttttttaagttcttgaagatttacattattacttttaaccttatcattttgtattaacttctctggaatcatatgaatatatctactttctccaggggccgccttttgataatctggatttgtataataagaaagttctagataatcttttgctctagtaattccaacaaaaaataatctttgttcctcttcttcctccatatctcttgtatgaagtggaattaatccataattaactcctgtaataaacacataagaaaactctaggcctttagatgcatgtaatgtcataagcttaacagaatctatatcgctatttatatccttctttaaaatatttacgccatatagagctgatgaatttataaactctctaagtccatctaaaaatggcatttgtttttctttcacatactctatgattatatcaagcaatgcatatatagcttctttatcatctatatatgtagctgaagttggctttatatacttatcaaattcaaagtaattataaatctcttctgccatcttaatatcagaacatttatttaaaaattcatgcattttttctagtagttctgatttaattatgttctgctctttaactattttccttgcagtcttttctgtcattttctccccatattccttattgctaagaacataaattgcagaggaaaaatcattaggatttacgcaaaaacgaaataatttaataatccaatttaaaactggactgtcgcttatggttttcttcatagatacttcaaaaggaatatcattttttaaaaacacatcttcaaaaacctgagactggttttgcagtctataaaaaattgcaatctccttataaggcacacctgatttatgtatttccttgatcttatctgacaaatagcatgcttcattaaaaggattataatgatttttaactataattttattttcagtttctctagctcccattaagcggcttccattttgctgaaagcatcttgcagcttctaaaatagcattacttgaacgatagtttattggaagtgaaagctcctttgcattatatttatgctttaaggtgtaaaccacatttaaagaacttccacgccagctgtaaataacctgatttggatcaccaactgcaaataatttagtattttcaccttttaacttatcaataaaatcaagctgtattttatcgctgtcttgaacctcatcaataataatccatttaggttctaatttatgctcacctaataataaatttgcattttgcaatatatctgaaaaagacatcttattttgttttatcttttcttcttttagcagctctataagcttaaatatatcatcatcataaggagaaatcttttcttcctctttctcaataaccatagcttgctcaagtctcttttttaaacggttcttatatttaattttgaacttttcttcttgaattatctgcaaggcaatgtctaattcctcatctggctctattactaagaagtctttttcatatcttattttttcaattggcaatacttctttaagtaaattaagggccacactatgaaatgttccaaacccttctaattcctctgattttatactctcatcagaaaccattaatctttctttaatttcatttgcagctttattagtaaaagttaatacaatcatatctttataactgatattttttgcataatgaagatacacgatttttgaaatcaaaactgttgtttttccacttccaacatttgcatttacaacacatgcatcactttcatcaagtaccgcttctctttgatattcatttagtctttctaattctttctcatagttcataagagatactggttataaacataataagtaatcataaccttctcctttctaactgtattctatttatgactgtttttaaagcataaatccaggttacgcttaattacatatagatttatatatttaagtctaacctataattaaaagctcttattctgtaagatcttcatatcttctttgtaatttactttttacattatttctatcttcatctatctcttcaagtctgacacttaattcaatccccattggagcatctgtatggaaagaaataatatttattatgctctttttattactttcttccattacccattctctataaaaagcattatttaaaactaaaattatagtacgattatctatttcaaccttagggattgtacttaaaaattttgcaaaggcatctccattctcttgcatatactcacaaaattctttccatttttcctgtaattcattaaacttaaatgctttcttaataaaggttgctggagcatattgtgctaacttaatatcctttggtgcctctatttcctctaataaattcttaagtccccatagaaccatagctttatttaattgataatctccaatacatgcagcgcagccatcatcacatgtacatccgcctaccatcttgattgcattttcaataatctttgcagttaaatcaaatactttctcagaataaccaagtccacctacgtatttatcataaataaacatataaacttcgctatcataattttgacttatttcaattgcattgttagacattacaacacctatgtcttcctgttctgtcatggttgccatcattgctgcatttttaattgcgtaacatataccttcaaaatgattatttcttataaagtttccattttgactttcctgaaggagccttctatatacagtgacaacattgtcaggaatctttatccaagtgctttctgtatcataatcctttgatagaggtttttctaactgttcaaaacctaaattctgatgattatgaaattgcagctttttatacatataaactatttcatcaacatttacatctccaaaagtcactttagtgcgttcatattccatatccttgctgccttgaattatccttatatttgttgtgcctcctggcattgtataataatttccattaaagggaatggcaaaagcagttctactttctaaatcaagctttacaacctgatattgaactccatcatgcatataaattgctccattatgaatttcacgaaaagcctgcatttcatccatttctgtaatttctttattgttatctttatttataagtttgtaccttgctttatcaatatttcttaagctaaaatctcctgctggaaatgaattaccacaccatgcaaactttccactttgatttgttaattcacttgctctgattaaaacaggaattgtttcgcctaaatctgggaaaattgaaatatcatctaaagttaatgggatttcagcagctgctgcacgtatatgtgcaagttctattaaaaggttattcttatctataactgcattttcacttccactttcaaaaagccagtctggattaattgctatgtattgatcaaaaggcagattatcaagtattaaataattggtactttcttttccgtttctacctgctcttccactctgctgccaaaaagacgccctagttcctgggtatcctacaattactgttgtatcaattttaccaatatctattccaagctctaaagcatttgttgatactaaccctcgcaaaactccagtaatcattttattttcaatttctttacgctcaagtggagtatatcctcccctgtatccagatatcttatcttttagagaagctccaaaaaagttttccgtctctagtttatctcttgcttcttttaatacaacttcaacatttctccttgatttggcaaaagcaataaagctattatcattttccactaaatcaggtattaaatcagcagcaactgaagttgattgcacctgcccataatattttttatcatggcccataatctttggtggttgcacaagcttataatttttctttggagctggtgaaccatccatgcaaacctcaagaaatttatgtccacagatttcttctgcaagttcaactggatttgctatagttgctgaactgcataaatactgaggagaagaattataatatctgcacaccctgccaagccttctaaatacatttgcaagatgtgaaccaaaagcacctctataagtatgaagttcatcaattacgatatattttaaattagaaaagataaagtcaaagccaaacttactgtgattcggtaaaaacgcagcatttatcatttcaggattagttaaaataatattagcattttttctaattctgcttctttcatttacaggagtatccccatcataaactcctgctgaaatcctgttagagccaaagtattctaagtaaggcaaaatagcacgatactgatcacttgcaagagcctttgtaggatatataaaaattgctctagccaaaggatttgatagaatttcttgaataactggcagcaaaaagctaagagtttttccacttgccgtagaagttgttattacaatattattcctatccattgctttttcaaacatttctgcttgatgactatatagcttatcaatccccttttgagacaaatactcacataattcttccgataaattacttgggtaatcaacgtaagctgcttctctttttggcattgttttattatatataattaaatcgcttatattcattaaatattgctcctattctcttaagttacaatcaaaaacaaaactccaactctaatctatacttgtgcgtatgcctcaccgaaatcataaatattttgctccgaaaagctatgaaaatatcgctgaagattctaagcagcaggttttaccattttagcatgctcccactttcagtgtaacaagctaaagtggaacaacctacagctaaaaatcttatcagctcattttcaaatgttttctccgcaaatatatttatgatttctagtgaagatataaacttaaagttttagtaactttgtaaatctgttcatctagtaagttgaattcttactttgtttaactatattttgcaacataattaattgctttctcatatgtctaaattcatttataattatataccaaagttattaataattatatcttaatgtgctaggaggaaataatttagataacactaaaaaaaggtaataaacattaaaattagacgtttattacctttatttaaatagatgaattcatggttttattatgctaatagttttttataaattgaggataaatgatttactgaaggcatcctctaaccatctccaaaatcatcaattggccgattgccaattcttaacttaatgatattatgctattcttcattattatctactaaattttaagcaatttcaaatctcagctataatataatgccattcatgttagattgtattttcaacgtgatgagatgttgaatcgttttattaaatcataacttaaaatactttattatatctatttgtcccttcaaataactcaaaccttagattaaagatataatatcttcatacattatattttcctttatcatctataaataaaaatagctgcataaatacaaatccagatacaaccttgaccacactatctgatgatgcatgtaaaaacattatcgttattatcaatattattaatgtaactattgttaatatgaagctaattatatatcttttaatattaataatttgtttcactgattctactattccgatatcaaaccatacaagcctgccaattaaaagtgctattattgatggtaaatatatactgtcaatcacaaaaattaacacagaagaaagtatacctcctaaaaatattatattggttaattcttcagtgtcccttattttataacaagattttaatatttttcttaaaaatcttcctataattaatattattaatgtaaaaataacatctttccattcaacaagaatatagaaatgtaaattcttctctatgccttcaattatcatgttccaaagtataacagtagcagaaataaagaacattgaagctattatactactataaacatttattgaataaatcgccttttcatcatatttgccataatcccaaggcaagtatatttttgccattaaaataaaactacctataaatccacctaaaaaaaattcttgtgtcacaataaaacttactacatctattgaattcataatttttctccgatcctatctttactatcagctaaagtttctataatttcattaattaaattgaaattataacttagtagtttttgtaaggtatttaatttttaatatttactagcactatctttaggaattgcattaacaaaaattaaatatggtttcttcttataacctgcaaatttatcataagttttatacattgcctctatcttcttctttgacccaccattatcaattacaagatatattaaatttctagtttcctctgcctttgaatattcttctaattgaacttctagtccatgaacaagttgtccactatttgttgttagctttatctcaaccaatgtcttgtccttatctcctttgcttgttttaaaatcaacaggacctcttcctatattacattcaggacttaagtctaaattattagctttacaataagcatctgcaatacataaaaatagttgttgtgcaatcttttcttttcttggcttaaggtcatcagtgtataatatctgtgacgcttttttgttctctatttgatacttaaatctttcacaaatatctttagttatttgaaatgttgttttatttttatctatatcctctattaaatcttcttgctttaacttactttgataaacagccaatacgcttaatccaagtggatctttttcaaaatcatattcttccaccttgctttctttgtattcattaattaacctattaagaagcatcttatcgcttattatattttcccttatatatgattttttatatattgagccaatcttgctccagtttttctttactagtgtattaatatcattttttatcttttcaatttctctacatactctatcaatgtcatcccaatctttagcaataggaagctcatgtaaaatatcttgaggtaataataaaatgatattctctttatatggatttattaaaaattcaccttcaaattctagctctggatagttttctttatttattccaagttgtttatatattcttttagtatactgttttatctcatcttccaataaagttgcaaacatatcacttaatctatccgggccaacattgtcttcaaataatccaattaaatgaaatatttctggatcttctgtacctgcatctattatcacttttgcatcatttattatcttttgagttaactctttcccaaatcctgaacctttacttccctttgaataacctaatccaattccatttacttcatggaaattaaatttttttattgcttccttataaaatctatcactttgccctttagaatgttttaatataagccctatatttttaaaataatcgtttatctttttataaccgttcttaaattccttaacatttgtatcttttactctgttgatatttataaaataattagcatctaaatctaaaatctgatcaaatgcttttactgaattaagtttgttacctatatttaaatatgttgataataaaatcattttaattcccctttcttaaacaaaaagactgagaactttaaaactcagcctttcacttaaatgtccatattgttaagcaattcctttaagcttttaagttcatcagtagataaagtaattcccttccccatcttctcatgcccaggaccccaatctcttaaatcatacttagcttcctttccgttccagctaataagatttaattctttagtccatccctttgatgattctgatattgaacctagctctttttctatttcaaatttaatatctgccataaattcttttccccttgctttctctttaatcatgttttaagtttaatattatcatcattgtatagctatttaataaaataccataaaactatttattagcttcatcgtatattttttcagctaaataatgaatcatatagttttgaaggtttccattagttaatatttctttaactaacctatcatttctattcttggatttaattatccctcttttaaaatgtgatttagcaaaagtttttaccaaatcttcatagctatttgccttggctatatccattacttgcttatcatttttaaacatttcttcatattgatctattattattctgtcttcctctgtaagattaattccaaagatatcatttattctttttattatgtcatctaaatactcttcttcaggttcatttattctcgattgtgcatcctctgatattcctacaagttcaccttcgccataagataaagaaatatcttcacctcttttatcatctttgcctaatttttgcaacttataataatctaagcttaataaattatcaatatcaatcttatgtttacctgtcttaggcagtttctttaataatgcaactaagtaaatttgaagtcttaaaagatttagattttttaaaggataaatttgaagcaaaaagttgtagaatgttatatattttgatgctttcttcttaaattcttctccctcttcttcactattagcttctaataagcagaatctttctacgcccttatcaattatattgttcatctttgcatcttgatttgctgttcttttttctttgtaataaagaatagcaaaatcatttaattcttcatcattataaataccatactcatgtagttgataccacaaatcatttactacatttggatcagttactttgtcaatattagttgcttcaaaatatggcttatacgcttcttgaatatcttctgttgaattttgaaaatctaatacaaaagtttgcttgctagggtaagttctatttaatcttgataaggtttgtactgtctttacaccatcaagcttcttatctacatacatagcacacagtttaggttgatcaaagcctgtttggtatttttctgcaactataagtatcttaaagtcatttttatcaaatatattgggtaaattgctatcagtaatatcagcagccactattctattcatttcaacctctgtaaactcttcttctccatctttgacagttccagaaaacgcaactaaagcttttatgttatagcccttttcttttatatacttatctatagcaattttatatcttactgcatgtaatctacttgcagtaacaaccatccctttagctttcccatctatccacattgatctattatccataaagtcatcaactattgtttcaactttttgtctaatattatgttcatttaagcttacaaatctattaatagcttttttagcttcccctttatcaaattcaggattatctgctatcttttttccaaccttataataaacactaactggcatatagttttttaacacatctaaaataaacttttcttctattgcttgtctcatggaatataaatgaaattcatgagacttaccatcctcacctgctctaccaaatatctgtaatgttttattcttaggggtagctgtaaaagcaaagaaactaacattccctaaatctgttctcttttcaattaaatctgtcatcttatccatgctagatttttcattcttttcttcttcactctcttgttttgctgcttcttctaacgtctttcctgctaaagtctcctttaaagcacccatgttttcaccagctgttgaagaatgagcttcatctataataactgcatattttctcttctctaagctctcaatcttttgaagtgcatatgggaacttttgaatagtagttattattatttttacaccactttcaattgccttagctaaatctgatgaattcttcttatcatctatttttactactaatccctttttatgctcaagttgatatatagcatcctgaagttgcttgtctaaaacctttctatccgtaataacaataacagaatcaaaaatagggttgttttcttcatcatgtaagcttgataatctatgagctgaccatgcaatcgtattggtctttccactacctgcactatgttgtataagataatttaaccctgctttattaacctctaaatccttaaccatcttccttacagcatctaactgatgatatcttgggaaaatggcttttttctttttatcttcatcttcttgaataaaataaaaacgattgattatatctaataaactatcgtgcaccaatatttcttcccaaaggtaatgagtcttaacttttccttcgaccgttggatttccttttcctttattattacccttattaaatggtaaaaagaaagtcttatctccctttaattgtgtagtcatataaacttcatcagtatcaactgtaaaataaaccaatactctttcgttaaatccaaacagcttttcctttggatctctgtcttctttatattgttttattgcatcatacacattttgatttgtaaattgattttttagctctatgactataacaggaaaaccatttatagataatacaacatctaaagtattattatttttagtactatatttaaattgtctagttatcttaaatatattttcattatatttatcaatagctgttttatttaaatttgaatttggtttaaaatatacaaattcaaacttaccattcatcattatatcagtgatcccatttcttaaaacatcaataagacctctctttttaatatgggaatcaactaaatccaagaaggccttcttatatcctgcgccccttgtccccttaaattcttctattaattcattttgagtagcttctaaaaatctaaacaaatcatcttttaatagacaatgttgtaaatcaaattcatgtgaaataccttgttcatatcctattgatactaaataatcctcaatagattcttctaaattcttttccttgggtaacatttatttttccccctatgctttatattatctgtaatctcactatatactaaaattatacaatatataacctatattttacaggatttaattattgctattaagaaaataattataaattaaaggcactaaacatttctaaatttaaatgcttaatgccttttaaatagtttaagttatctaatttttactcttaataagtatttgagtatatattacttcacatattttaagtgatttttctttaggaaattctcttattttttcgataaacaaatctacaactaagttacaatacctgtttttctttggaatcgctttatactcaattacgtcttcaagaaactttgaaaattcttttgttctatacttagaatcatttaaattaaatctatttatatgcttttctatgaactgtttttcttcatctctataatggtatatattactaggtataaatctttggtttaataaatcgtattgaatcaaatacttatttcctgtaattttattttcaattccaaaaggttgtaaaattatttctccgccctttttttctgtataaatctttctaacctcattatatttattgcagctctctatacaagttactccacattctgaaaacacttcaaaatccttcacttcgtctactgtaagtgctctagacttttctccttttttcttaaatgacccattgcacttcgaacatgctatagaaatattactcggacagtttttaagtttatcacaattaaatttttctactgaatgctcaagttctccaaaattttttctatctactaaaatctttgtatagcaatacatgcaataacctttagatgcttctgtaagaacttcctttaaattatctttaccttttccctcatatgaatataaagtgtctttcttatattctggaacaaaattaggtatatctaacacaaaaatattatttctcacaatatcaccaactctttatttgatttaatattagtttttgagaattagttaataatgttttatcaatatttttcaattgctcatcttcaatttctgtccatgtttcactgattttagaactcaacaaatttctgagagttatttcaatatcatctgtttcacttctgctacttaaattgtaaattttttcaaatatatctctcacatcagtaacacttgtaaaatcatttccatctaagcattcgtaattattgctacttaacacaataatattacaatctatagaacttgctactacatctgctgaatgtgttgttactacaaaattcatatctttaaatgttttaataagaaacggcaatattctttcttcattttttgtagataaaaactcatttatttcatcaataactaccactggactcactatactagattctaaagaattcttaaaataaattaattctaaaaataatcttattattgcttgataaccactcgataatttttctattccatcgcccatatctaatactttctttttaccaagtatcttatcttccttaattgttatttgaaaatctatatttaaaaaattctttatcattagctttaattcttcatgatagttaaaatacaccttttctataacatctgtaccagtttcatataaattaaaagtatctattaagttaaaattattttcacttaatctatatttgactacagacttataagttccatctaaatcatctgaattagtaactttttcataattaaagcttctattcacggaatctataaaataatagccttcctcttgatttataagtagttcttttagaatttctgatttaccacttgaattatcaccaactataatcgtatttctatatttaagttctttatttaatattttattttttatttctatcaacatattttgatagctcttcgtagacataattcaacctcccttgtaccttagatttacttgatgaagagcttaaaacatatttttcataagaagaatcatttgctatagctttacaaaaatcatttcctattttatattttccattcacataaatacttgcaagatacaagctttctaataataagtttgctattctatcgccgatttctattttatctataaagctctctatattttccttgtacatatctattgtagccttgtcaaagtgtatagcttcatctgaaaaatcatttaaaaatttaggatatgaattttcatagttatatagtttaattgaaccattttctaatttaaaataatactgcaaggctgcaaatctaagcaataattcaacatctctactatgtctatgcttttcaccatagatctttctccacttttcattagtattattaatttcatgtagcatatcataaaattcacattgatatacaccatttctaagctcttgatttttaagttctgttccaccactatttaagttttcaaaaaccttatataatattctatttttttgtttttcatcatctacttttatttcaataacagaaatagtagtaaaatcaacagttcttcttatttctttaggcaatttatcgtatcttatattaataaccttttcagtatcatcttccctatatttcaattcataagtaacatcttttaaagggtattggtcttccaataacttctcaaaagttatttcatccctatttaatctctcatcagacattaatctttgtaattccacttgagtattggtactgttcttaatatatttgcctttataatataaaaataaacttaatattctttgctggccatcaagtatttccagtttattctttccactgcggtatacatatataggcggtataggtaacccccttataagagaaatagctaaattttcaacttgctcctttgaccaaatatattttctttggtacttaggtattacatataataggtcatcaaaaccatctatcaaagtcttaaatgctaaatcagctttatattgagttacatttgtattctctataaaactataatccttttgttcagttaactcttcatcttgtttctctatatcatcaacattataatttttttcttccatcctcttcaccaccttattcaattatacaatatttgtattatgtttaatatataagttgtaaccataaaatatatttttcacttaaacttatatattaattttatatttcatctaaaatttttatttttcctgtgacagcttcacttattagagcttgtttggcttcttttagtttttggatttgacatctcaacttattaattgaacactctatacctccaactttaaattctaatgctgagtatatttcttgttgctctttatatagtggtaatgcaacagctaagttattcaaaagattttgtgataatgatgctcttgttactaaattcatttcttttacaaagaattttctatttaaatcacatctaaaataatattttgaaaatcctttatataatttgtctttaaatggtctaaacctaattaaaaaacctgcaaaagttgcatcagtaattgtatttaaacacgttgaagcaaaacctatctcatctacagtttctgacgttctagtaaagaaaacatctccttctaaaacagaataaattcttctgtcgtttaaacttgaatttaccaaaccatttacaaattttggaatacttatatttttgtatacatcaccataacttacaaatggatatccaaaaccaaattcgtctccacttttactaattccattttgcaaatttcctaaaaatctaagtcttttaacatcccactctttaggcacatctcctaaccatttaactccactatccttcatttcctctttttttctctccaccaattcatatccatcagaagttttaaccaccttaacttttcctgtaacagcatcacttataaggcttttcttagcttcttctagaatttgaatcagagcttctttttttgagattatgctatcaacttgggctgttttttcatttaaaaatttgactattttatcttgtctctgaacattaggtaatactatattaatattattcatatcacctaatgaaatagctggttgagcagtagtagaaactattaaatctagtgtgccattattttttatatgaagcaattggtagtgaatatattgtgtattagatttttgtttatcaacacttaattttaaactgtttcctgaaacaactgctttcttatcaatcctaggtagtatattagataatccaaactgagcacctattttggctataacaatatcattttcctttacttcacttcttttaatagtttcaaagtgttcggtagaaattttttttaaactatctaactttaaaattccttgtgtagcaaaattactttctataacatatacttctccattttctataaagtgttcactttttaaattacttccaaacggaccatctacaaatgaatttttatcaggagatttaatatattttatcttactaacttcccaatccctaggaatcttcccaatccacttaaccccactatccttcatttcctcttcacttctatatctaaacttcattatccaagcaccttctttatctcaactgcaatttcttgttcaagatcttctacttctttcattatatctgaaaatgctcttaacttttcatatttatagaaatgtcttgtaaatggtatttcatagcctatattactaaatgtagtttcatccatatatgcatctggcacatgtggttttacttctctttcaaagtaagcatttatatcttcctttagttgtattgactctgtatcttttaaacttgaatcactttctggatttccttttgagtctttacatatatctgcatcttcatttctttctccaatagagctccatatagcctttaataaagctgctcctaaagtcaaatcataattcttagctttagatttaactttttttataaattcttctctatttaaataaacttcattgctatcaaagctttggagcatttcaattattttattttgcacttctttacctaaagcttcttcactggcttttgctgcttcatcttttttcttcgacactgctaagtttataaattgagttgtttctttaactttacttatagcttcttcatctactttaaagcttagctttaatggtctttctattgtgatttttctgtatccaaattctttattatcaaatatcctacagttttcactaggttcaaaactttcatatatagactttatttcttgtatttgctctgttgatatttcttttctcttatttccaagactttttctcataggtacataaaagtctgtggcattaacaagctgtatcttaccttttctattttctgtttttctattagtaatcacccatatgtatgttgctattcctgtgttgtaaaacatatctgtaggcagagcaattattccttctaacatatcattttctataatccatcttctaatattactttctccactgcctgcatctccagtaaataatggtgaaccattgaaaataattgctattctgctgccttcttcatcatcatacattttgcttatcatattttgaagaaataaaagcgagccatcacttactcttggagttcctgctccaaatctcccatcaaagccaagatcagcttcatctttaactttcttttcttcatctttccatgtaaccccaaaaggaggattacttattagaaatctcatatgttcaccactaaatctatcttctgtaagagtatttcctagtcttatattatcaggattttgtcctttcattagcatatcagcctggcaaattgcaaaggattcatctagaagttcctgtccatatacatctacaatagctttttcattaagattttcaacataagcctctgctatagagagcattcccccagttccacaacagaaatctgctatggatattacttttccttcttcagtaatgaaactttctttacctaagaataacatttccatacaaagttttataacttctcttggagtatattgctcccctgctgctgaattttcagtaaatcttcttaacatttcttcatatatataacccattttattatttgaaattttattaatatgaagatctacttcactcattttttgaagaacagcatataatttatttttcttatctaactgagtgatttcagctttaaagttaaatttaccaattatctcttttacattattagaaaaaccattaaggtattcttcaaaattagctttaatattctcactatcatctaataactttttccatgtaaaatcagacacattataaaattgcaaatcaatattatgattttcctttaaatctgctattactatttcatctatttcttcttctggcatataatcataattgctatatacttttttaattatttccttatcataatcatctaaaagacaatcgaatcttcttactactatcataggaatcataactttcctataatcttcctctttatatgttcctcttaaactttcagctatgttccataaaaacgaaacaaagtttaaatcattatccattttgttttcccctattcttttataattaatttctatattattttttacgtagttcaaattgatcttacaattttaattactaaactatcaaaattcaatagttcaatcaaaaaagcgtaagataaaatatattttaaataaactacactctcttttttattaaaaattactttttaatacattttaaaacttaatatactatttgattatagcatttttaataagtagtgtttatagtaaatattcaatcaaccctaattatctattttacagaactatcatcccacattttaattgttatctcaattcttcagttctcaaatcatcataaatgttgaaatacattcttttaatacagttcagtaagtaaattgaagattttgtattattacattatagatattaaataatgtgttctttaatctcctgtatttaatgcatctaatttaaatttatttatttgtagcactttgcagaattcagttatttttattcaataaatttccataaatatctttaaattttattttcttgtcaaaaatatttatttctaatcctctagatatcatacttctatatacggtttgtaaagtactaatggacaattttaaaaaagaacaactgtgttgcaaccaagaactcataatctaaaacttctttataccaattaaatataaataattttcaatttccatatagatcatacgtaatttgaccatatatactatatgtagaggttaatttaacatcaaacacaatatatgtaaaataattcattaaatttatagatcttatgtatgaaggaggtttatatggattttaattatatcgaaactttagttactaggtgcaaggataatgatgaaggagcaaaagaaaaattagctgaagaatttagaccattaatttataatatctcaaagagaactttcattgatggatataactcatatgatattattcaggaatgctatcaatcactttttaaatctatctctatgtataacttagacaagcatagattcgttgcttatgctaccaatgccattaaaaataatataaatgatttgattaagagaattaaaaccagaagctctactgaaggtaataatgctctaagtttacatgataattttgaaaaggacatcccatcgcaagaaatttctcctgaaacttcattatgtgaaatgtgtgattatgaagacttaagactagctctaaaaaatttaactaaagatgaaaaagagcttatagattttgtattctttaaaaattatacagttcttgattatgcccatataaaaaatatgtgctattctactgctattgtaagaaagaaaaatattctaagaaaaattcacaataatatttcattttattattaaagctaaacgtctaacagctccaaggttaatttttttatccttggagctgttattattacaatgtgatttatattatatccaatagttttggagattaaatatacactttattcaaaactaaaattatttataacctcagtagtttcttccacatagctatcaaccactccgtcaattccatcgcaaatatatctaaggctacatccctagcatttatctagtatcccattctctaacaaagaacattttaagtcatcctgaaaagtagaatttctaattgctaaagctgtaaatgaaattaaaaagtattcatccagacattagcatatgtgtcagcaccatagttgatattgctatagattattaccataatcacattgtaactgaaggcggtactcaatagaaaacaaattaatggattatcgatttcaacaataaacttaataccataatatcaacaaagcttggaatgtgaatttttattttctccttaaattaagtttaatttattcatcttttttatctcacgatatataaaaattaaagatatcattgcagcaagaaaatcagctaatggaacagatacaaaaataccagtgactttaagaaatattgggatgattaacattaatggtattaaaaatataaatggtttcattattgataaaaataatgcaggcttaggtttgccaatatactgaaaaaagcttgaagcaattacttgaacacctactaaaggactcataaatatcattactcttaaaataggaaccgtcaatgctattaatccattatcagatgtaaaagcacccgctattttgtttgtaaaactaataattataactaaaaataccaatgaaattacaactgatgctaaaattgcaagctttaagctttgttttactctatcgaattttttggcaccataattaaatcctataataggctgaagggcttgtctaattccatacatagtaatggtaataaacccgaatacacgattatatataccaattgcagaaacatataagtcagatcctccataaacttttaatgaattattcaatactatggctagaattccataagccagttgagtcataaaggtagataatcctaaggaaatcgcttcctttaataactttatattaattgttaaatttttaacttttacccctaaaattttgctattaaaacacatgtatactagtaaaaatatgaaacatattatttgcgaaatgtctgtagcaatggcagctccttttatcccatattgaagtcttgtaaccaatatataatctaacggaatattaattacaggccctattatcatgcttatcatagcaatattagcatgtccttctgattgtatgatgctattagcaacaatactaaaaacgaaaaaaacactgcaatataaagtaattctaaagaatgttacagcatagggtagtatattttccaaagaaccaaagatatataacataggtcttatgaaaaccagtcctataaccataattaaaattcctaataaaacagaggatgttaatgcggtccccacagccttttctgcccttagtttatctccggctccaaggcttctagaagttatagaagcaattccaactcctatcatttgagaaagcgccagtattatttgttgaataggaaatactatagttaaagctgcaattcctaagctaccattaggctgattacctataaaaattgcatcaataatgttatataatacattagctaaaaatacacttatagcaggaatagaaaacttaaagagtaattttttgatactaccttccagaataaaattttcaagttcagtcatattattacctcctcttacttttctttattataacaatccgcgtaaaagattttttgacctatcttgctgttatcggaataaaaagatatgcatcaatatttttttgattaggtacaaaaccattgggataaaactcatatgcgtaattatcgcatgggatatacaattcatcagtaagtaagctaaaccagtttctctgtatctgaatctgtatcttttcgattatatttgttaaggaatatactgcataatcattctccggtatatatttatgtactaattgagcatctttcctgtcaatctgactaaaatatcgactatcaattccagcgataaaatcgaactcataactcctcacttcttcatttttacaaaaatccaatccgtaaaccccatcaatttgattatatattttatccaattgcactttttgagcagtttgattaaaaatacgtgcaacatcatgttttttattatccccatgatacaataatcctgttatctcaaaagaatttttatgtattatttcatattctgttgctgttccatatgacatcaccctctcgatgtcttcctgtgtaattgaatatttatataaatttaaatattcaatctcattgtcacgataatcctttggtgtaataccaaaatatgccttaaacatacgggtaaaactttcctgagaactatatccacacattatagctatattcaatatactatctcttgtctctaataagctcatcgctgcaattgtaagcctacgcttcatttgataatccccaatattctctcccaacactgctttgaataatctagcatagtgaaatttagaaaaattaaactgcttcgcaagttgttctaatgaaactccctcaagcaagtgtttttctaaatattcaattgcatccaaaacataattctttgtattcataacatcacctcatagatttttcttaattacttgatctaagcttatatgacataaaacttaaagctaccaatgttgccttttctagatttgatggatataattaccctatcttagagaaaaaaaaagtacctatgtttttcgcagaatagtactagaatatcattattatactacaattttttattatttttactatattttcctcaattataatttactgttttaataatatacatgttaatcaaatttcaaaactgttttcattatcccaaactctccccaatcaaatgtaatgtaatcacaatacgtaacctacgtttattgaaaaaataaccattgctatcaatccaaaggctataataaatattacagatccatctattttttacaaaagtcttctctcttttttaattcaattcttatttcacccctaatcatttaacaaacacactctataattctattacgcgattaaaatttttctccactaatatttaagacgtattttcctatcttaaaccacataaaaatcgaacttttttaagccaacagccttcaaacccgcattattccagcatattcttcagaatattagaatatcagaatatatattctagtattctgaagaataaatatggtggagaatatatattctttaccatataagaatattgactaaatgttttgagcttgtaatatgcatttacaaatttgttaaaagttgagttcatatctttactagaaattataaatatattttcatagcttttaggaacaaaatatttatgatttcggtgatgcacacgcataagtatagattatagttgagttatctataatgctcatttcttctcactatttgttgtatccatcagctgcgtgaaactcaataatttattttatatctaattatttatacatattgcaattcacaatgcacatttcacaattcacaattgcggctaaaattcctgtaatatttttagaattatgatgaagaattatttttgcaacgtatatataataatttcattaactattttaaaattgtttatgtacattcatatatccattaaaaggaggtggatatatatgcaggtaactgatttaattaatcttatggttaacaatggctttgctatagctgtagcagcatatttgctaatacgcttagaaagacaaattgataacttatcatcatcaattaataggttaaatactataatatcagctaaacttggagtagctattgatactgatagtcctaatgatgattctcataacgtagcttaagaaaaaggcaataaacattatgaagtgccctccaaatattaaatatgagtgtatcatatgtctaacatttaggggacacttcattatccatattgcctttttcctacaagtcggtttctattccaacactctttattctaaattatattttaatatagtattttttacattagttataactccatttgaagcgttatatcccttaccagttttaaaacataagcttctaacttcctgaccttcatcctcatctatataataatgctcgcacatttctaattcatatttatactcatccgttcttcattcattcgatactattcttaatttataaaatacgtaaactttctttctgaaaactctttataggcatctcgataaatttgaatttgtcgaactttcaagcttcgtaaaattcttataattaaagaaaaacttccatattactttatataagacatatcgctaattcgcttaattaatcgtttcccgtcagcggtttcttgcataaaactaactccaccagctaatccaaatatttcacttttgttaagcatttcaatatccatacctaaccacattgtattaaatacactaagtaaatctccatgagaaactataattacattctcatatttattggtcattagctcattaaaaaatggtaataatctattccattcatctcttctgctttctgcatcagaaaacatcttatcatcaatagatttttcttgtacttctatattatctcgcagccattgtacagactttccaacacattttccaaggtttctttctctcaattcagcaacaaaaattggtgcaactcccaaatgccttcctacaatttctgctgtgtgcttagctcttaataaatctgaagaatacaatacatactttttatctgataactgatttgataagttttttccaatattattcgcttgttgtattcccacctctgataaatcccaatcagtccaagaaccaaccatcccattagtatgatgaatagattgtgtatgttgaatagttattacatttttcatttaatttcccctcttgttaattttaaatttattctatttcaatatttataagtatcctttagtttattagcctccaaattacaatctatctttatccccacagctcatatccaatttaaagtactatctatatttttaactttgtagcgagtatatatctgaaaattctatttgtattttttctatattagttttaaatagaattttatcttcttcttcttcatttttaatcaattccactggtaattctattataaattcactgccttgtccttcgacgcttgcaacacttatttttccaccatgcatttcaacaaaagatttaacaagatataatcctattccagtcccctcacattttcttgaaagagtgttatccactttgccaaaacgttcaaatataaaattaagtttgtcctttggaataccttccccctcatcccttactttaacgataacacttgtttgtttgtctataaaatcaacatatatatttcccttagaatgactatatttaagagcattcgatattaaattaagcattatacgctccatcatatcatggtcaaatcccatgatcttttcctcaacgtttgtatcaaatataagtgttatatctttatcattgacataagatgccacagattgagtgatctcttcgataatatttacaatattaccatttctcttttttatcctaataaatccagaatcagaatttaacttagttacatctaaaaaattatttattattctaatcaatcttaaacaattttgtttcattgttttaaagtataatttacatttttctatgttttccaaattataattgccaaaataaatatttacagtttgaactgctgaataaattacattaacaggtgtcttaagctcgtgagacatattagtaaaaaagttcattataagattgttaaattcccttgactcattaagtaactttagatttttttctatatcttcttgcagagattcaactttcttttcagatgttatatctcttaaaaatgtcaaaactgatggtttccctttataagtaaaaaaagatgatgtattaatcaccggaatgaattcaccatcacaatttaatatgctctcctcacttgtaatctttacaagcttattatggctaattcttgagtatttttttttaatatctttgttaacttccgataaataatgattataaaagttctctccctttaaacctaataatttagttgcacttgcattagcatatataacttctccatttgtatgtacaataattgagtttaatgaattttcaaataacatatcataacaaattttattatttaataatagagattccatctcttttttttcattacttaatgtactaagagtttcatctttctttttattattttcagcttcaatattgacataatatccaagaatccacgcaacaagaataaatacaccgcacattattaaatctttttgaaaatatatattaactccattctctaaggaatcatataataaatctgctccaagaataataccacaagaaaaaagtgctgttactatcccacatttagaaccatattgaataattgaatatattattaataatagaaataaatatttacattcactttgatatgctttggataaatatataggtatagatataataaacataaaaataatattatctattaaccatgagttttttaataaaattcctttttgcaagatcacaccagtaattattaaacacaaaatgaaatttattccaataaagagcgaagaaaaaattgatatatatatattaaattgagcattttcatgtatatataaacttgaccaatactctggcaaattcatatgtattattatgctactcaatactataattgcaattttaataaaacacatcattgtttttaatttgtcattgtgtttatttgtataattatccatatgcatattcctttcaataaataattattaaaagtaaaaattgtaaattgatttatgacaatttttacttttaacattgatattaataattcttaatatctcttaaacattttggttcttcaggttgatataatccccaaccacatgctgacgccgaaactcttagtgccattcttctacaaatatttgatgtgagcttaagtaagaaattttttaaaatattgttcattaatttcatctcctctgcattctatatttatattaaagataatttggaatgactttcttattttttagtacaaatttcagagttatgattgatattataaatataattaagcttggaatcccatatatgaatcttgttattggctgtaaaacagaaatatctgtatctatatttaagccacttagtaataacatatttatggtttcacttaaagaaagcataaaatataataaaaaagttcctatcacattttttattaaaggtatatcaataataaacataacaataattatagttagcattatacaaatatctgtattcactccataatatataggtaaacaccttataatcaaacacgatatagctaatattaaacttgaaagtatgtatttaaacatatcaatagtttttctagaaaatatgtgtatcccccatattaaaataaatgattctggaataagtctaaaaaagaaatctacgcaagtaaatctaaacattacattcctcgctttcctttaatattttatatatttaaaagttaaagtattttctatattaatcactattttaaattattttttatattttctcatttttacattgtcatcttccacaggcttattttcatgtatattttaacaatcatatttctactataaaatgattgttttgtttatcctatttttaaagttactttgcctttggtgtcactgatgttcccattccctcaattatgtattttaaggcggagtcaactttgtttaaaaagtttattccatttttagtaagagtaatagtctgccataagactcccacactaatactttctattaattttatgtaatacaattctgaaaatttttcgttgagcatgaataaaattattattataaatgaaaaaataaatatagtaaaaatagatttcctcttaaattgctttctagtttcaatatttttaataggcttcttaatactatctacaggtgcatttctaaaaactgttataaatgcaaatattataatagcaccgcttattactgctacattaatactatttatgctgtaaaatatattattaattaaaattccagctaatactgctgaaaatgttcctattatgacacagcgacttggtgaggatgcatgtacaccgcctgaatattttctaagaatgctggcactaatagaaaatattaaagcttcataaaacactccaaaaagcaacccagcaattatgacccataagatagcaaatagcatttgaaacaaatttattgctccatatacgattatctgttcttgttcttcattaacattcaaaaataattttgcattattaccgattttagttgctattttttcagttagagacattttcgctcatccctttatttttaataatgatttcatcattattatgcataataaaacaaacataataacaatgattaaaattctataaatttctttacaaaccctatagtatataggcatattacttagaaaaataatatagataataatagaacagaaaaatcaaattgactttctatattaattgctattttatctttttgtagctttcagccatatcaaattaatttacatattttgtttctataacttataataagcatatttttataataatgtaaatataaatggaataaaacgtcaaaatattggaataaacggaaatttattggataaatatgtataaacttgatttacatcaccaaatgactctgcttaataattgctattgtatataatcttaaccattatttttgttcattaactattttgagtacagtaccaagcgcgatatttaattctttagcaatgctccgtatattcagcccttgctcttttaaatttagtgctctatttcttaattcatctgatacaggttttcttccagcatttcttgaattctttacttggcggactctaactctctgtttctcacgaaaatataaattcttatactcttcaagttctaattttaatgattctaaattgcttaatagaatatcatattccttgacactaatagcgcttttatcagcttttatttcttctatttccctacaaagcctagcattttctttaattactgactctattttctctttatataagttaacttgttcttgtaattcctcaatagtcatattcgccattaatattcctccattcataaattaatttatggatatattatactcttttattttttaatcttttaataattattttcttaacatttgatattgtattagagttacgcattacttgtacaaaaaaataccgcaaattcatacgaataatgcggtatttcaatgaaggctaaaacaagttaaataatataatgtatatattgcaaaaataatccttcatcataattctagaaatattacaagaattttagctgtaattgtgaattgtgaaatgtgcattgtgaattgcaacatatatatcatctaaacttggagtatctattgatacagatggttctagggagtatcaataaaaatctttggatactgcttctgtcgctttattaataaaagcagcaattttacttggactttccttcataccactattgacccacttttctattacggctatagtaccatatgcggtaaatgtgtaccaattatcaaatagtttttgatcaatatatttttcttccttcttccatttctcaatatttaattcgtggctgatataaataatacgtttcaataattctttatccccgttctctgaaaataatactccacatatattgctatttgcttttatatacttacaaatttcatatgatagcttttcataagtttcaaggtttaaagtacgttccgcaacctgtctgatttcttcatataactcaccttcaatatttgaaagaagttcaaactgattcgcataatgtgaataaaaagtattgcgattgatatctgcttttttgcatatatctgtcactgtaactttgctaataggacgctctttcataagttccagtaaactgttttttataatcatttttgtatatctcacccgacggtctgctttttcgtatgccataataccgttgccaaaactttataaaactttataaaatttgtttaattccctgttcaatgtgtccgattttgtaattctaaaagaatatactactttcattgaagtaatctaatctgcttttcaagttttataatgttgctagttttgacaaacttcctcccttctttatttaactcatattttcttgatagtttgcgctgcaacctacgtaatcttttttctacacctacagatacataccatcaaaactcactcttggattcgtatacttaacaccaattagtatttattcggctgctctaatcccccccactttttcaattaaaaccatattagctttgacttttagttttatattgtcattatagaatgatgctttagagcttcttctgctttttaaccttgttctatctgttagtcctttaaaaaatcttttgaaatcttcacaaccatccataggttttctacttcaactattaacttattcatgtataagttaagttttcgtatagaatccatataattcttaatcttcttcattttaagtattagctataatctcagtaataattccacatttactacatagattttctataattttaaatcccaaaaatttttttttgccttaaccttaagagatgattgtgttgttcttatttatccgccataaataattcagtgaacgaacaacacttatctgatttgtaagatatcgaacgtaatgttattgaactgcctgttgattaagtagcattgtgtacttataatatatttaacatacaacatatttgaacgttcaaataaattataattttaaatggaggtaacacaatgggaaatataactatagtacctgtatggattattcaagatattttagttctaatcatcgccgcattaatggtcttctatataattgaaaacgaagaacgtccaaagattgtattaatgcaattcctatgttttgtctttttctacgccgcagtctttgaaaatgttgcggtatctatgggacttatgggaaataaaggtttttacgcctatgggcacagtatcctaatgatattcaatataccattaactgttcctattatcgagtttcttatcgtttactcaactttacgtgttttgaagacgatcaatataccggcatggactaaacccttcattactggacttagtgctatgatttttgacttttcactggatccagtcgcagtaaaacagatttttcaaacttcggaaggaatcattggccgttggagttatttcccgatccctggtgaacctgtcatatatggggaacctgtcatgaattttactggatggatctatatagccggatactggactgcatttattttaatcggtgaatggtggcataaaaagaaaggctatagtaaactaattggctacatatatccgtttttggcttccattctttctgtagtttgtttggtttcacctttatccaatttctttaattatatggcaccatttttcccaagaacttctaatatgcaatgggtaatgttgattgcacttactataatttcagtgggaattttagtgttaaccttaaccaagttatgggatcgtaaggtcattagttctatggattacaaaaacgattttcctatcatgtttacattcctgggttttccactggttaataccatattttgcattataggtggatacatgcaggtactatggcttgttgttctggcacaggtgttattattgctatgctggattggaattcgtattttgagtaaaaaagttattctcaagaaataaagtgcccctgcaagttagataaatattcgcacaatagagttttatattgtcttattctattgatccattaattagaaaccaatgaaaatctcggatataatctataaacagggcaaaaaaaatcgggactgaaaaacacatttttcagtcccgattttttctcatttttcactttaaaaccactacatattgtggcttacccgtctcacttgaccttagagccactattcgtcatcaagattaccgtctccacgtgtcacattactggaaacaattcaataatgtttttagcattcttgataactttttcaaaaaacctcatttacttatggcacagttcacagtaacagttgtaagttatatacatctactctatcgaaaataacgctgctttttctgcatgaattaatgttgtatcaaataatggtgttttggtatctctttgttgaactaacaaacctatttctgtgcatcccaatattactccttgtgctcctttattagttaacttatctataatatttaaataaacttctttggaatgtttggatataatacctacacataattcattgtaaataatttcatttacagtttctatatcttctttatctggaatcaatactctaatcccatcttcaatcaacttggatttataaaaatcttgctccatagtatactttgtccctaataacgcgatttttgtaatattttctgcctttaatacttgtgctgttacttctgcaatatgtaatataggaatgctgatagcttcctgaactttgtcagccactttatgcatagtattagtacatataactataaagtccgcacctgctttttctaaagtaagagctgcttctgataaaatctgtgcacttacttcccactctccagttgattgacatttctctatttcatgaaagtcaaggctgtataataagcatttagcagaatgtaatcccccaagtttttctttaataacattatttaaaacttgataatatgtgactgtgctttcccaactcattcctccaattaaaccaattgttttcatttttacttatcgccccaatctttaatatatattattaagctacttatattctaacaatataatactattatagcacaatatgccatggttaatttatttaatttttgttatttgaatttgaaaccttatattaactcttcatcatttctttactcagatctataaaagctcttaatgcccttgaaccccacttatctctatgatataccatttgcgtagtcaaataaaaggaatcttcccaccactgaagttctattaattgctttcgtttcaactcctcctgagcagcaatcttgggaagcagggttattccaagaccgctcattgtcaattgtttgattgattggatacttcccatttccattattgatttcggagttaccccagcatcattgagacttcgttcaaaaagatttcggtagccgcagcctttttctgcaacaattatgttatagtcagcaatatcttcaggataaacatgtttcttgaaagcaagtggatgtcctggaattgctaataaaactaaaggttcaggaaattccaattctgtgattaaatcagaatcatttattttctgaccaataataaaggcaacatcaatctgattttctcttattaatgttttacatttattattaccttccatttttaaaaggatttcaatttccggatagcggtcatgaaattcttttactagaggaggaagcctaacagcgcaaagtgattcattagcccctatcgtcaaagttccctttactacatctgatgtacttaaattactttttgcttcatcacaaagcttaattatttgtttagcataaacaagaaactgttccccttctgaagtcaaagatatatttttccctaatctttcaaacaaattaacacctaattctttttccaactgttgtatctgagcagtgatagcagattgtgaatatcctagttcaaatgctgctttggtaaaattactcagcttagccacggtaataaatgcatttaattgacgaaattccatttctatatcccccaaaaaatcaatcatttattttgattgttacaatttaaactattgatttcactaattattagtagcatgatatcatattgttactatcttttcaaatttaatcattaaggaggtaagctatgttcaatttatctgcacttttatcttatgttcttgtttcaacttttacgtctggtccaaataatattatgtctatgacaaatggtactaactttggatataaaaaaacattcaaatttgttctaggtgctacaactggtatggctgtgatcatgttattgtgtggttatctcaacttatttttatttaaacttcttcctaacataaagttgtctatggaggtatttagttcggcatacataatatatttagctatcaagatactcaaaagtaattctaacccaaatgcaattaatgattacagcatcaacacatttaaatctggaatgcttatgcaattcatgaatcccaaaacaatactttatggtataacggtaacttcaatttttataatcccctattataaatcgagcataatattatacttatttgctatatttctcgcattcgtaggatttatatcaatgtcctgctggactctttttggtgcattatttcaaaaaattcttagccgtcatagaaagttattcaatattgttatggcatctctcctaatatattgtgcattatcagttcccgattttaaacttctaattcatttatttatctgatgtctagacggagtaccactttaaattattaaaatgtgcattgaaaaatggtatagcttttatttcaggcgaagcatttttcccaaatggtggtcataaaaataccttacgcttgaactacacaaatattaatgaagagaaaataagagaatgaattaaaatattatcaaatgttattaaggaaaatatgctaccaaacaattaatatgaaaataataagaatgtaataaaaaatatatcttagatctcagcataaaaacatatcaatatatacaaatgtaaatcttgggttcttaatattaccattagtattaggatatttaccaccaatatttttcttgaaaaaagaagaaggagaaccgcattaattttgacttggttctcttctattaataagatacattattgagtaaaaagaaaatatcatcttctctaaccaacatagtatttcgtgatctttcgagatgccttaggaactttagtcttttttattgacaaagtaaactatactaaatttttatagtcagctagcttaccttcaaaattgataacttgaccattgtgatttttttcatccaaagctaaacctacaatccattctgcagcttcttcaggcatttttacacctttccctgttgtatgattattcagatcagttgaaacagcaccgggcatcactgcaaatatctgtatcggaagagcaatctcatcaatgctaattccccaagactttgtcattatattaagtggtgcttttccagttagatatgcaaaagggttcatattaggaaatggcattggttcaattggaattgaaacattgactattttgccatggttctctataagaatgggtaataatcctttagacagctcaaatggaccaagaaaatctactgtataagtttctaaaagctcttcttttgtaaattcccagctagggcgtttaataagtggtccaggtatacctgcattattaaccaataaattaagctctttatattcatttgaaactcgctttactgcctcttttatactttcactatctgaataatctatttttattaaatcaacaggaccatacttagcaagttctgttattgcattcttgccacggctttcatctcgagcaccaactaaaacatgatatccttcttttaataattttttagaaatttcaaaacctattcctttgttggaaccagtaactaatgctgttttcatagtaagcatctcctttttttaacttgtgtttctttagtatggttctaatattaatgtataatcgcttgatttggaagttcaaataggttagcatggtattaactaaaagtttatgcaaaaggagattctttaaatgaatgaacaattgaatgcttttattcaggtagcagagtctggtagcttttccaaggctgctgaaaaactgtttgtttccccaacggctgtgatgaaacagattaattcccttgagaaggaagttggtgtacctcttttcatccgcaccaaccatggtgttgaactgaccgatgcaggaaaatccttcaataaggatgcggaatttattttgcagtattttcaagaagcactactgcgtacacgtaatacaacgcatgtagataagcatattattcgggttgggacctctatacttaatccctgtaaggttttactggatctttggaatgaaatcagtaatcaacatccccagttcgaaataaaaatcgtcccttttgaggatgatgcatatacattaccaaacacttatcgtaacattggcaaacattttgatttcatagtagggccattcctcacagaaaattggaatgattattcccatacacttaagctaggaacttaccgtttttgctttgctgtatctcgcaaacatcggcttgcttctaagaaaaaactttctataacagatttgtatggagaaaagttggttgtaataaaaggtggaactagtgcatccattgatgaaatcagtgaatttttcataaagaaccatcctgaaattcatattaaaagtgttcctcgtctttatgatattgatgtattcaatcgctgcgggcaaaataaccttatcctcttaacattagatgcctggtcagatattcatccctccttagtgaccatccctagcgatttggatttcactataccttacggcttgttctatcccttaaatccatccaaggatgtgattgagtttttaaaaataataaaagaaatgcaaactaatcattaattttaaacaatactgccttctaatgtattgctgatagttccgatattttagtgtcttaaagcattttttcttagcatagtaatcttccatattttttacaatagaaaaagccttaatcactgtttcactggtaattaaggcttgttgtccaatcacataatcttttaaatttagaaatatttcagaactgacactttctatcatctgataactttataatagccaatgtattaaatattataagtacttcctttttaaagctgtccttatttatagatttcccccaaaaaactctccaagtttattaactgcttgattaacatactcaggtacatcatacattgcgatatgtgtcgcaccttttacttcaaataattcttttggactatttgccaattcaattgcattttcgctaaatccttttgtattagcttcacttcctactattgctaaaataggctgtgttaataatgttggcacaaatccgaatgctgaaaatgctataatcttatcaagactagtaaatagtaatttatttgttgaatttgggtgttgtgcacgaggtgtacgataataatcatatgcttctttcataagcaccattggattagcttttgcttcctcttctgtattaggaacatatgtgatatataaagaatcttctccgttggtctgtgcgctacgcatagctgcaaccttatttaatgtttctaatgttgcttctaagccacctagcataccatctcctctaaaaccagcaccaatatcaaatgcacttattgtagcaactgccttaattcttttttctgtcaaagcagcattaatggagtatccaccgcctgcacagataccaagtactcctaccttttccatatcaacataagaaagtgtactaagatagtctatagcactgcgaatatcttctactctttctgtaggattttcaagatagcgaggttctccaccgctttctccctgatgtgatgcgtcaaacgctagtgcaatgtatcccatttctgccattctcttcgaataaagacctgatacttgttcctttactgctccacctggatgaacagccacaattgctggatatttcttgctttcatcaaagttttcttgagtgtataaatcccccttcatttctatattagcatttttaaatgttacatgtttcatcataacaactctttcctctctgttaaactttttataatttccataactaatcatttgaactggtcgttttattccctccttaaatcggctctaaattttatttgttatgctatgtttcatattttcttaatccatatttcttgacttttcaataaatttacattaagcttattcatataatacaccctaaagttaactttaggtcaatacctaaaattagagaggagcatacaaatggaatatactataggtgaagtggcaaaaatcatgaacctttcagtaccaacactgcgctattatgataaagaaggacttcttcctttattagaaagaacagaacgtggtatccgaagattcaatgacaacgatataagctggctcaatatgattgaatgtttgaaaaatacaggaatgcagattaaagatatcaagacattttttgaaggatacgtggaaggcgattctagtattgaaaaacgatataaaatgttcttagaaagaaaggcagaagcagaaaaacgaattgaaattcttcagaaatctttggagttaataaattataaatgtaattactacaaaactgctttagaagctggaactactgatatccccgaacttcagcaagcatgcagtgaacatgatgctcctaataatcataagctctttaaagatgttgtttgcaaggaatattagaattacaaacaataccaggtacttttctttctcctggtatttcatccatttatttctatatattatcctgctgtgtcacttatacatatctctcacatcttcaatttctcaattcataatcttcttatttgattatttttctattgcttttcttactactttaacagtttcctttgagcattccattttcaagatttaaataatctctgttacagttaatttcttttacaattactgcttctacctatcgtgattatattaatatggaaattaactggtcagaagcaaaaggtcgtaataatttattctatcaaacaatttatcaatattcagcttgcattgcagttacaatttttttgtggaatattttaaaatatttattttcttattgatttagtctattcattatagagtatagagcttcatattggctttaattagtatgaagctctacactctataatatttatatttgcttatatagtatgattataattatgcttcaaaaaaatctccgttacttgtggtagtcgagtagagaaagctctcacgaactttccccctctcagatccgtacgtgcccaattaaggcatacggctcctcatattattttatagaacttgctatctatatacatttacattcattttaggcttaggtaaaggattgtacttcatatacattttaaacttctccaaatcaaaacttcgcctttggcttctgcggttcaaccacttgaaaagtgctttctttatttctaggcagaattgacctatcatatatgaattatctgtaattccatagtactgataatgcccaataagcttttgttttgttaatttgaaaacatctcctatatgaagtttattcctaacagatttaatccactgattaaagtccttaatttttgctttaaatttctttttacttgttttcctctttactctaaagtatcctcttttgctctttgcacaataatgtgtgaacccaagaaaatcaaaggtttctgcatttttaaatcctctgcttttccttatttcttctgcaaatctcccaaataatattagttttgatttagttctttcgacttcaagattaaatttattcagcctactaactagcaacctacagaattgtctagcttcgctttcgtattgaaagcagcatacaaaatcatcagcatatctcgttatttcggattgacctctaaaatttcttttaattactttttcaaaccataaatctaaggagtaatgcaaatatatgttggctaatgtaggggatactattgagccttgaggtgtgccaatttctgttgtctttataataccattgtccattagtcccgcttttagaaacttcttaacaagacttattatgtttgggtcaccaattctcacttctaagaatttaatcatccattcatgatttacattgttgaaaaatcctttaatatcagcatcaaccacataatttattcttccattttcaatcaccttgtttagtgcttttatggcactatgacaatttcttttaggcctaaatccgtacgagaaatccttaaattcagcttcatatatagattgtaatatcttatttaaagccatttgtactaatttatcttcataagaaggaatacctaacggtctagttttcccatctcccttaggtatgtaaactcgctttacagcttgcggtttataactatgatttcttaattttacaattaaattttctatattattatccagttctttagagtattcttgttttgttacatcatctattccggttgctttattacctagtaattgcttatggcattttaaaagcatttctttgttaatgtaatggtatagtgatgtaaatttttcttttgttttttgtctagcaatttctgctatcttaatcaattttgtttccactaattcttctactcctgtgcgtagttaatgtttccttagttaagacaataatatgtaatctccttccctcctttggcattacccactatcattggtactatgagattatccgactccccatcaaccttttaatattcttcctttttatcggttgtttattatactcttttttttgagagttgatagggtctcctgagttgctatgtaatcattgtatagcatgcttggctctttgcccccggggaagttatagtagactcgtcattatcgcctaccataatattgcttttcagagaaccgacaccgtcagccttcccaactttatacttattacgaggctcattcacattcaagcctacaacctagctgtcaacgcttaaaataaatagttacctatttatctccatgactcgctactgaatgatttgacttaatcttttcagaatggatttccaccatttaaattacacaaccttgctcagccgcaccggttcacccttaattattccaaaccttaatcagtattctttgtacttttatctactcacatcaacttcctattataggcattataagaatacaatcctattgtcatctataagactatataacccattataatctttttttcatacaaggaacaacactacgaaatatatctgctagatgtaaactgtacaaattatcatcatgtattaaaagcgaatcttcattctaaaaagagccagtaaatcttccatcaatattgatattccattttcttaaagaaatctacttttggttcaagaaatttaaacttatggctcttagcatcttcaaaataagaagtaataggttcaaatatcttatcccaattccatagctcatcatctatatttagataatctttaaacatttcacatccttctggtgctatagggtgtattagtactgctataactttgcaagcgtaaaaacaatctgctattacgtttctttttaattcctcatttttaatattactagcccaatgtttatttacttcccttatataatcatcaagaacatatgctattctatgaaaatcttgattatacatatgtctttcatattctaatactgatttttctgttaattccttaatcttttcacttacatcttctttaggaatatcttcattaagactttgcaatgtataaaaacatgagcgaataagtctattaaatacatttgttaaaagatttccctcttttaatactggatctgctcctactttttcttcttccttcatgtaaacttgtggtttaaaaccaacactttttgaagataatccaagactcataaagtgcatgcgtaattgatccttcgtataaaatttcaataattcatctgccattggtggcttaatatctgaactgctgcttgcttttttatccataaataaaatgtgcttattagaaacaatatgtggcaaatttaacttagtaacatctacattttcacccttaggcatctttaagccaataaacatggccatttcagcaattgaataaaaatatatattatcttcccctataaattgatatactattgaatcatcattatcccaccaattacgccattcttcaggattcttacctcttgactccaaatacgcttttgtaaaagaaattggagcccataaagattctggccacacccagaaggttaaattttttaaatattctttatctggtacttttactccccactctatatttcctgataatctaaaaggaaccaatgtcttaccactagtatagttaatatttaaattatccaatatttcttttgctttatccctgtcctctagtgtttggaaaataaacgctagtgaagattttttctcttcatctatggtttcatggcttggaaatttagcttctagatcatttacatcctttatatattttcttgggacatatattaatggcttctttaaaaattcatctatagtgttaatttcatactttcgtctattagtattcttctttaaaaactcattaagctccttcattatatccatggattcatctaaggtaaaataccaattatctacactttttaatattggtttatttcctgataaagtgctaataggattaattaattcagatgccatatattgatgccctaatgaacattcttctgcataggctttatcagagttacatccggctatcggacattttcctattacttgccttccattaagaaagattttcttatcttcatcataaaattgcagtgctgacatcttctttatataaccatttttgaataaagtattaaatatttcttctgaaacttcattatgaaattctcctgtccttccaagggctgaagctccaaaaatatttaggctgatattgtaatcttctaaggttttcttttgactcaaatgatttgccttaacatagtcctccatagtattttcgtatccattttcctttagctttctgtagctttcaaggataggtgaaccataacaatctgtaccagatacaaaaataacattttctttccctattctatctcttaaaaatcttgcgaatatatctgcatggatgaacattcctccaacatggccaaaatgaagattcttatttccataaggcattccagctgttactatagccttctttggaaatgtcggtctttcgtttttttctattcttttacttatcataaacttttcactccttaaatttctaactttcatacttgggataatcaaaaaataaagcatgtatgatattttaaacttataattttttatatgctcaattttaacgtcaaaaaagcccctgtagaaaatatatctacaggggcgaaacttctatttcgcgatgccacccttttccctaaaatgtcaccattttaggctcttcaagtacaccatctccctaaaattataggttaaatcatactctggttctgtaacgtgaacttacgtcatagcatcacttataattaatttttatcttatatttaggcataagtaacatcacatcttcttcaaatgcgagttataggttgcactctctaagataattcaaactaaattcagcgaaaataaaattccacctaaaaagttttactttataagatccgtatgcagctccgagacttgtttcattatgatttcataatttcctcacaccaaatggaaactctctgagtattccctcataactactcttctcttcatagcttttatttttgtacaattatataccttataacattaagtgtcaattatatttcttgatagtttttcatctatttgaaatctctataactttttattatataggtgtgtgatgtaataatttttaaccagcaattattcatacggctcttctataacccagggaatttcacaaaataattgaagttgaaaatacgattcatgatcagaaagatttgccaaacttggatacaattcttttgtaaaataaaactctacctcatcagttaacgtacttgtcttaaataccttctttccattttctgaatcattttcagcattatcaggtttttctaatatgttaccactaattaaataatttacatcatataggaatatattatcagcaactttatccagcttataagcgcatataggtgtttctggaacaataaataagctctctaaaaaatctataaaaactttaggcaaatgccttattccataataataatttctacaatctgaacaacattcacataaaacatctttatataactgtgaataataatttttagttttttccttatcaatttctattttccaaccttcaaaaataatacccttcaactcatcaccttcagcaaataattcacaataaccactattgtaacaagatgcccatcctcatcaaaatgcaacgtaatacaatcagtacttgtaattgagtatatatcatcaagtccattctagttacgattattcgctatattataattcgtcgtataaatagcaattaatatactcataacttactctacaaattgaattttaaattgccacttatttatctatattttgaggaaaaaatctccaaacacgagaaattcctgtttcaatcttatgtgtatcgttaaatatacatttatattcatctaaattaataaaatctgtcatgactatttttaattcatctaaagttgatatctcatcacagtaagcactaactccactaaattccacttctccttcaaaagaaaatggaacatcttctccgtattcatcattccaatacacatttgcatttcctgtccattgaactagaaatttatttgcatttctctttaaaaattttattgttccactagttacatcctcatgttcaaaaacatacaatgttcctgcctcttcaccgtttgcattatattgagaatcccattttagagaaagtccttctatatctttccatgattttatatttacgataaaaccgttgttgtgatataaacgaggtgaaaccgattcataaaaaatttcttcatcgtcttctaagtctttcaattcttcctcatccaattctgttacaaaatctcctgctttcatatctatttctataaaccaatggaattcttcctttccagtactttgcattcttctactcatggcagaatccataaaactcccaccaaatgtcgcattctccacatcaaacgttaatttccctaacttaaacatatttattttacctccacaactcagcatctttatcactcactcttagctccgaatttgtaatatttctactcgttacttcctcttactaaaagtatgatatatctatcatattcagcaagcattacattgaaaattatacatgtgtaacatctgctaataatagaattaacttcataaattttgctattattagcaaatggtaaatcatatattgccttgggtttctgaagataatattcaatagtagtctcaatttcttttgccagaacgttaattttatttaaattaacagtttcatcatatttatacattttaataatagtctctaataattttttctcacaagtcttttcaaatttaaagtgtgttgaatctactaatttatttatatcagttgtatcaccttcagaactcgcaccataccaagaattattcattcttttctttatggcatcttcaaatgtaatttcattattctctcctatataaaaaatatccacttcaaaatcttcatatctgatccccaaattatacatttgtgcattaaattcatctgaagctgccgaaattattcctcctaaaaaaccagttgtaccattttcacacaaaaaactatcacaatctaaactcattataacctccaaaatctcccatacaaaatactattctttaaataatatgtatcttcatgctttggattatatgaacctagtaacctatcaataataaattttacaatcttattattgttactaaattttctttccgagcacattaaaagttacatttaattattatactctctaagtattttatttttttgaaataaaattagttttttatcttctattattttcttcatctcgtttaaacataatttatctggttttgtaaaatcgatctttatattattcttaataacattacccccttcctcataatgcacattatatttacacgtatctgaataaaatttatgtgttaattttcgtaacgttccacctttagaagctttacttctaaacatgatatttataaaatctagctgatctgttgggtcaatatatgtatctaatataataaattcttcaaatgaatctagagaataatgtacttctatagcactcttacggcttctataattatatagtgtttcaacaattctataaacgtcgaattctacattcaaaagttccattattttcaaaaaagttggttcaatattatattcatctacatcctcatcaggatatacagctagtgtatcaaatggtatagtcatttttatctcaatatcccacataatctgttccaatatcttcaccccacaaattatcacttttattatttaatatttaaattcgaattataaattatatgttcccacatggaatttttgaagtagcataagtttttattaatacttgcaaccaactatctgtatatccaactaattcactatcacataccaaaccaaaatcatctgatatataagcagccaaactatcactgtcacataaatcatacactcttaaatatgtatttttacgatattcatttgataactttctgttttcatctgaatatcctttaatcttcttttgttcttcaacagctttatatacacgattccattcactatcaaacagttcactatcacgcaagtccaaaatttcatcagaatctatattattaaacattgatccattcaatttttctaataaatcatcaacaatcattttaacagctcctcctcttaataagtgtaatttgatagtggtcttcacctacaaactgcaatttatctctcctgtatatcaataacctcttttaatgataattcaacatatctatttttagtaaacattgtagaagttgtatcttccattttatccataagctttaccaaatctatttctttaggtaatggcgttatatttccattttcatcttcacttttatgtgcagtaaaaataaaattcccattttgaaaatctatttcaaaactattcattacctctaaggcattaacatctaaatactcttcttgattttcaataaatttttcatatatgaattcaaataatgcttctttactaattttaataatcctatacttatctttatccattttatccccctttaaatactgatatttattatgaaaagttatattggctatcaatatactatattacatctccataaaaccaaattctctgttttctataaccaaattcatctgatacctcttctaagtaaccagcttcagctaaatttgtcataacattaagccctgctattagagaccctttgctaatccttgaccatttttgatatttaatatcctttctatcccaaaatgtattataataactattttcataaaaaattaaaatttgtgaatgtgcaaggttttcttcataaaccactaatattattttgcaaaatcctatatcttcaggtttgctagttaaaatttcctctgtttttcttaccagacgctcaaaaatttctcttctatcttttccttttggtttgaaaaataaatttgcataaattttaaaatattcatcgctaaatggcttattaaccagaggattaaatactgaataaaaattatcaattgttcttattacacgtttcacttctcttttataccatctttgcttcttgcgttccatagacatgttttacttctcctgacatcaatactctagttcttgatactttgataaattacaataattatctttcaattcaacatattttcaaaatatcatactgctcaattctcaaagaacaaattgtatttgtccacctcaatctcagattcgtagtattagtctaattgatatctgaacaataagttaaattatttctctttccaaatcccttttagaatatccacccattatctatttatattaagcttcacactttttaaatttgggttgattatagcacccaaaattttattatatcttcaagtttattaattgtaatttcttcctcattagtcaacacatacttttcattaatcattgtattaattaacaacttattctctatactctgttttaatatttcctctaatgttaaaaacgcttctcctaaagtaatatccccactttctatatttttagaaaaaattgcttctttaacaactgaattatttaatttagaataatacttaattgtatatattggcttcaaatattccctgtcttcatcattaaaattagtcgctatatctactgcatactgctttatattatgaattttattgttatcttttctactattaaataatccaaatagcataattattgcacctctttatattattaaattcatgctgcaaacttctcattataaacattgtaagaatataggcttatcattatctataatactatataacccattataatctaattttttcatacatggaataattatctaatttatcaaaaaaataaatatgataacattcgtttatgctaccacattatagatctcttaaatgttttctttatcacaaacattattaacctttatcttatctaattcttcactaagaatcatgtatttttttgcaatactttacaacccctaatatataaataattgttgctcttaatagaattacacatcgatcccccttagtgctaaattgataaataattttgttctatttatgtaataaccaaaatttatccatatatcctttatgaaaacaaagtaaaggaggtaatgaaacatggctgtaactaaaactattgactctgtttctcttagtattgaagttcaaaaaggtctagacaaggctggggacgcaatttataccaagaaaactttctcaggtataaaaacagatgctacacctgaaaatgtctatgctattgcagatgcaattaaaggtgtattagaagctaacactagagattactttattaatgaatcttctagtttagcaaatgcttaagcagataagtgagcatccaaatgttttatttggatattcgaacttagttaactcgtgaatatgagttaacttcctcaaatcttttgtgcgaatcgcttactcctatgacactaggagtaggagtttccgttccttagctcttctctaaacagaaaggtggtgaattaaatggaatatactttagctatgacttttttaacttctgctggtgaaaaaagcactttaagtgtttctggtgttaaaactactcttacaaaagatgaagttaacgcacttatggacactataatttcaaaaaatgtttttaaaactaaggctggcgatctagttaagaaatccggtgctcaggttactcaaagacaagttactaaatatgaagtagcttagttttaggtaaaattatagaagcttaccattcttcgatatgctccctttataggaacagctttattcttttaactgtctactataaatggagcatatcacttatatggcaagcttctattttttattcaatatgttttattttaccttgaaacctgaatcacttactagtaacccatatacattttccttatttgttctaacctatctgttgtaatttactcatccaccaatctttatcaaaatatataggcctaactggaatcataacgatatattcattgtttgcttctataattttggatgttcctgtatatactaaatctatatacaaattaaatggcttaactttcctttgaactttattttcaaattcactaatatattcattaattttttcattgccaaatccttcaaaataggaaagagcattcctgcctccaccaaccatttcccaccattctacaaaaggtcgccatgcatttttacaacattcctttaattcatagtatggaaaatctgaaaagtcaggtggattaaacatattatccccatgatcaaatctttgttttgaaataaccttttcccctctacctttaatcatattattaaaccattcactccattgttcttttaacaaaggtaattgtttatgacatttgttactaaaatactttgaaggccataacctattttcaccttctatattatcaatatctattaatccatataggcaaccagtaaaaagagcaaagtttaatgacatatcactggatactactactttccatgattcagttccttctttatacatactataattctccttaactatactagctcatcacatcttaccattataaatcaattataacatatattatttatttctctttaaccttagtattaaatttaaattatactaattacgaaaaatggactttttgcgatttatattatagctttgttattttcttataattaatgtatagaatattaaaatcgtgtcaatagttaaaatacgtttcctattcttaataaatatagagatagctaatcattattctcctaatatttttcgctatctctattttttttgtaaaaaataaaaggcagactaagtatttttacctaatctacctttattgcaacttttattttttaatgcattagttttaataaatcttattgatttatcttatctcgttttaattttaaaatttcttcaactgctttcttatagcctccagattctttgaaagaattacttatttttctaatattttcaagataacttgaatcagttaaaactttctcaacagattcccttaaaatctctggattaatattatccttatcaagagaaatagttgcacctaactcttcagctctttttgccatatatggttgatctgcacctataggtattgctacaaaaggcacattgttatacaataagtcactagtactattcatcccagcatgagttattgctacatcagtatactttaaaacctctgattgtggaacataatttcttacaataaagttattaggtatatcaaatttagataagtctatattatatgctgccattacaacaacttcatcagtattaccaaatgttttaaagaatatatcatatagattgctatcagtattattaaacactgtacctagtgaaatataaacaactttctttccctctaatttttcaaaaggaaaatctaaattttcttttctatcatatattggttggcctataaatttaaagctctcatcataatattctggatgtgcaacaaaatatttagatgtatatgcaatatttatatcacccttattaaaaaataaatcaaagatattatgggacatttccacattaaattcttcttttaattgtcttgaaacttttttataagtctctataactggatgattttttattaaattttcattcattaattctttgtgctgcgaccttaattctttaggagttgcaaacactgcaaaggaagaaactgaaggtattttcagtatttgagcaatgatacttccaaaaggaaacatggccgtgtacataatataatcgaattttttgccttcaatttgatttaaaatatcttttataattttatcacttgatttaagcgtttcatttatataatcaagaagtttatctggccccatatcattagaagtcttatgttttcttttaaaaaggctcagttccactctataacttttaaatttggcacctgttttttcaattttttctttaaaatcttctgagcagaaatacgtaatttcttctccttgttttactaattcatttactaatcccaatgtaggatttatatgaccatgcgcaggtatacttaaaaaaagtacttttgacataaatcaacttcacttccattctttatatttacacttacatattctcataatactcatagtaattaaatagcattttctctaaacgtccaaatccacacattaaatgtaaattcctcggtattaagtttagattttttaaccagaatatattaattaatatattctgcattttttcccatgcatattattttttttgcatgaataagcaaaaattattatcacctttcatatttatcttttaatataaaaagcagtagttaaagacctcctaactactgcttttaaaatttaaaatatgatttatattaataaattccatggtgctttatattaaatatacgtaaatatctagcctttatatttgcatatcccaaaataaggagaatgagtttatcactccccaattttccttcttataaactctattcccttttgaaataccattgtcttaatgtttatctttgtttcaccactaggaactgtgtatttctgctccaatactctaaagtatcctaagtctacaaactgttgataaggaatattgtttttatctaaaactttcttttctcttaaaagtgagaataaattatttctgccaattcctcttatagcaagaacctttgcaacatgtcccacttcaatgctatctttagatcctgcaacatcgtcataaaattgtcctttaggctctaatagctttaccttattttcagcttcaagccttgcttttctctcttcttttaacttagtagctgcagcaataagtaaatctggattatctaataattcatctgtagcatacattcctgttttccgtatgctaggcaatacctcatcaaaaatccatgcttcaaatttctctgctccaggtaattctgatttggctgctaacctgtaaatatctccttcaggaattacactcatttctatattttgaataacctctgttccatctctcctctttccagtaactacccctatgtcgtgtttcacgacacccttgcaatgccttaaaattgcatctcttgggtttttatatcccaaagcttttgctatatcaatcccaacagcataatctttattattaatttttaaccatcttatttctccaaatctttcatctttaaaaattcgtaaactctccatttttgtttatcccctttttatagatttactcttgacctaacgcctttttgcactcaccacagacaagtgcatctctaaactttgaaatacctttatcactcccacaaaagatgcagcctttaatatatttcctaacaactacctcattatcaaccttaattatttccatagaatctccatcattaattccaagtacctttcttatttcttttggtattacaatccttccaagtggatcgagctttctcactattcctgatgctttcatttttacattctcctctgcaaaattattttcttttatatgattaaatcatttcttgtatatctcaaattttatatatttactaagccatcataaccacaatatactgagatgatttcttgccttgaattactcttgtcttttcttataatatctttattatcttttctaaaattagatttataggcacatgagagaaaataataaatccaaaatgccatgattatttttttgaatgtgccttataaccgagcttaatgttctctccagtaagctttatattttcattaataatttcctcaatagcttttttatccatatcctaaacactccttaaatcttcttaacttctactcaaaattttgaactatttaacctcataattgttatttaagaactcaacttattagatgaacatatttacaaagttgaaaaaactttaagttcatctcttcactagaaatcataaatatatttgtggagaaaacatttgaaaatgagctgttaaaggttcttagctgtaggttgttctattttagcttgtcaaactgaaagttggagcatgctaaagtggatacaacctgctgcttagaaccttcagcgatattttcatagcttttcggaatcaaaatatttatgatttcggtaagtttccacttaaatttagttttaaagtgggatatctatattttgttctgaacttattttaatctaaagttattgtgtatgtctttctcaatttccaccacataatccttactcatctcataaattcttgagccaacagcttcatcaaaattcagtaatctttcaatgctaaattcactgctgactatgattggcagaaagtttaaatatctataattaatgatttcaaagactatatttatatcactttcattgattttacccttaaagagatcatcaataagtaaaacctcacatagcttatattttgagatggtcttaacgtaatattcttggtcaaggatgttttgctttatattagtaattacatctctataaggcatgtacacaactttaatcttctgctttaacaaatttaatccaatggcaacactgagatgcgttttgccactgcctacttggccacaaagtagaatgctatttcttctgctatttctaatttcatcaaaatcagtgcaataagctgctgatgtatcctttgctctttgcgatgctctattccacactttataattagcaaaagtatgctttgtcatttcaacattaattcctgaatgcttccattcattttttaccttctcaatttctctacactcacagctaactgcaaggggctgcctattttcttgtggaataagtacccacccagtatcacagcatttatcacacttatatgaggcttttttcagctttttttcgctgctcatctgtaaggtttcgtggttcctttggtttgaatcctgcaaatttgtttttatctgggttactattatttccatagcttttattgacatttttctttacctccttatcatctggatatccttctcttctccaatttttcagtatgccatcaatgtaggtcatattaggtttattagcttttaatgctatatctatagccatctttacatattcttgaccatgcattcctatagctaacttaagtgcgcctaaattaagaacattagctattccagctattagttcacaatacttagcaagttcaatagatttagaatttatatcatcttctttctttatctctctatctttattattctcattcttaatcttgttcttattctctctcttattctgcaccgttacagtaacgttacttttatcatccgtaacgttacaagatttttttgtaatgtcacaaatatcatttgtaacttcaatgctatattctttactttcagcacagctatgttcttcaatttcaacattagtttcttcactttcattaactacagcttcaagttgttttttcttttctctatggttttgaactctttttctattttgatctctaactctgtccattccctcaacattttgatgtctctcccaattcactattctgattacattattttcagctatctcaatcatttgaaaatctgataatactttaagtgcaagtcttatagaagctagaggccttgagaatattgtagataacatttcatcagtatatgggatattctcatttagatatataagtccattagcattagtttttccagcttgtataagtaatcttatccataaataatgaatagtatctctctctggcattgcatccactaatttcatcttttcatcatcatgcatgttagtagataacttaatccatttaatatctgacatgtttctcactctcctttaaaagaaatactttaaacctttccaatttttccatgagggcatcaatctcacggaagtacatacatccgtctaatgcctagacattctaatactccaatcacttccgatagcagttaaaaacttacactcttagatattttaccttgtggctacattgtggcccttggggtataagttcaactaaatccatcttaaatacaaaatttaacatgaaaatttttactttatatatactctaagtattttaaggtccaaactgtaaacctatctttcaaaattattacaaataaaaattatatttttcttttttaatagctattaactcataaaaatgtattctaaaattgccttaatcctcttcataatttaattctcattaataaagattaatatctattaggggcatatatatgaatagtcaatcatagctttaaatttaggtaaaaatgaattgttgaagaaatgggagattacttatatactcattattaataacattattgatagaaagattgatattgaaatacatatcataaaatgaggtgaatacatgaacagtattaaagatcacatattacaattagaacaggagttattaaaatcagaagttagaaagtcagctgataaaataaatggcatgctatcaaatgactttattgagtttactagctcaggaagtgaatatcattacaaaaatggtgatgtatttcaagaacagaataatcctcaaacattatatggagaaatctcagattttaaaataaaggaactgtccgatgattgcatattagcaatgtataaaataataaagctcaatgagttgaacgaaaataaaaaatattcattacgcagctccatatggaaatgctttgatggtaaatggaaaatgattttccatcaaggaactttatcatctaactctgaaataatatagataagcattatattagaaagcaaaaatatttttatctctgctttttaatataatatttattacaaaatacattatagttctctaatgactatttattataaaatccagatttaatcataactgcatttatataattacaaaaactaatctcaatatgaatatcacaaactctttccgcgaataataaataaaaagtaaggtggtgatataaaatgggatcttctcaatacaatagaaataagaatgataagagcaatgttgataagatgaaaggcaagaataatcgtgataaaggcaacaatcaagttggctcaacagataatggaaaataatctattttacttaaatatattataactaagttaacagcaaatatataattaaaaaacacagcctacatcaatactcagtaggctgtgttttttcatattattttttatataaatttttaagttcaaattttaaaatactaataaaataaaagtagaaattcaccaaaaaatctaaattccacttataatttagaccatactagaaagagagagtactcttttttgtagcattgcattgagaataaagatgtaagatttcttcattagaagttgttcaattattgtttgtcacaattttatattgggaacaaacagtaattggtacaacttctaatgttagaaatcatcagcttttattctctagcaatcgaaaaacagagtattctctctttcggttgagtatgaattataatttatactgcgtcaaagaagctcatttgatcactttctggaaggccatttaaacaatcaaattttctaagaagctctatggcagcattaccaatctttgaacgtttctttacatcatctactgaattaaattccttttcctttgctgcacttgctataccttctgccgctacatttcccatacctgctatactgtttaatggcggtcttattccatcttcttctagctggaattttgtagcactagatttatataaatcaattggaaggaatttaaatcctctttcatacatttccaaaactatttcaaggtcatcatacatatccttatccttaggaccagcctcatttccaagagcctgaatttcctgcatctttgctttaaccttttcttttccaaagatcataaattctgcatcaaaggcttttgctcttatagtaaagtatgttgcataataagcctgaggtatatgaactttaaaccatgctattctaaatgccatcattacataagctgctgcatgggctttagggaacatgtattttatctttttacaagactctatataccattctggtacatcatgttctctcatcatagcttcatattctggaaatttaggttcttttaaggctttacctttacgaacagtttccattattttaaacgcggtattaggtggaagtccttttctaattaagtaaaccattatatcatctctggtacataccgcatcacttatgctggtaattactccattatcaattaagtccttagcatttccaagccatacatctgtaccatgtgaaagtcctgatatacataataagtctgagaaagtttttggttttgtatctacaagcattcctcttacgaacttagtaccaaactcaggaattccaaaggttcctacctctgaatttatctgatttggagttaccccaagagcctttgttgagaagaataaggacatagtatccttgtcatccataggaatctcatgtgggtcaacccctgttatatcttgaagcattcttataactgtcggatcatcgtgccctagtatatcaagcttcaatagattttggtcaatagagtgataatcaaaatgtgttgttataatatctgagttagggtcatctgcgggatgctgcacagggcagaattcaaatatttctcttccctttggtacaactataattcctcctggatgctgacctgtagttctctttataccagtacaccctactgaaattcttattgtttcagctttgtttattgtaatatttttttcttcataatattttttaacataaccaaacgctgttttttctgctatagtaccaatagtccctgctttaaatgttgttccctttccaaagataacttctgtatatctatgggcctttgcctgatattcccctgagaagtttaaatctatatccggctctttatctccattaaagcccaggaatgtttcaaacggaatatctataccatctttatacagattttctccacaaacaggacatactttatctggtaagtcaaagccatttagaacgccataatcctcaaaatcagaatacttacatttaggacatctataatgaggtggaagcgcatttacttctgttataccagtcatatttgcaacgaaggatgaaccaacagatcctctggaacctactaagtatccatcttcatttgatttccataccagcttctgagcaataatatacattactgagaatccattttttataatagaatccaactctttatcaagtcttgcctgaactatttctggaagtggatctccataaagttcatgggctttttcataagctatatcttttattgtctgctcacagccttctatatgtggtggacatttttcaggagaaatagggcttatttgctcacacatatctgctactatattagtatttgtaactacaacctcataagcttttgttcttcctaaataagagaattcatcgagcatttcttcagtagttcttaaatataatggagcttgattatctgcatccttaaatccctgtcctgcttctaatatacgtctgtatatttcatcttcaggatctaggaagtgaacatctccagtagctactacaggcttacctaatctttctgcaagttctacaatctttttattaatttcttttaaatattctttacttggaacttgctcctgtcttactaagtaatcattatttcctaaaggctgaatttctaagtaatcatagaaattagcaatttcctcaatttgttcttctggttttccaagaagtatcgcttgatataattccccttcactacaagcacttccaataattaaaccttcagaatatttcttaaacatgctctttaatatacgtggctttttataaaaataatctaaatgagaatatgataccaatttatataaattctttaatcccacgtaattttttgctagtattattgcatggtgagttttaacctttttatatgccactttcttagcttcttcatcggctgcatataaatctatatctgatagagtttgtgcgcctctttcttttagcttttcaatgattatgttaaataccttaacagttgtatcaacatcatctaaagctctatgtgcaacttcaacctttattccaagattcttagcaattcttcctagcttataagatttataatcagggaatacatcttgcgctaatcctaaagtatctatataggtaaaatcaaactcatagcctaaaactttcgcattatgctttaaaaatccaatatcaaagtcggcattatgcgcaactaaaacacttccttcaataaattcaagcaatttagggaaaactttatcaatagtttctgcatttttcaccatatcatcagttatctttgtaacctctacaactctcataggaattgacttttgagggtttacaaaagtactgaacttatctataaccttgccatccttaattttcattactcctatttcagtaatcttttctgtctgaggagaaaaacctgtagtttctaaatcaagaacacagtataccgtatcaatactttcttccctaacatttgttacagatggctttttatcaggtgctaggtaagcttcaactccatatataactttcatatctggattatctcttccaagcaatttgtgcgcttctggaaatgactgaactactccatgatcagttatagcaatagacttcattccccagctcatagctctcttaattaaatcactagcactagacatggcatccatctggctcatttgagtatgcatgtgaagttctactcttttgacctcagaattatcctgtctcttatatttctttattccatttgtttcaataacagtgttagcaataagttcaacttcatgtgagaaattactatatcctgcatttccagcaagtctaagccccttagcctttttaattctagaaaatacttcatcatactcattaggctttgcaaaaatcttacaagtcattgaatttgatccatcatataaatcaaaggaaattaacatctttccacttctcaattcttttgcttctaaattagatatttcaccctctaaagctactcttccctcatcaggtgttatatcattaattttaattatgttttccttaatattagcatttcgccctaaaatcaagaatggattacttgcctttttgccatcaccctcagcttttacctctggcttaccttcttcagctttaggtacttcaggaggattattgctttggttaatttttatttctttaataactttcatctcattagcacgtttatcttctacaattttcactaattcttcgctatctatttggtcaataaagttgatattataatgtttcccgtacatatgctttatagctttattaatttgcttatcatattccatggtttttagaaaaccagatacaggaattttaaaattaaaatttatagtatttccttctatttcatagtcactattattaaccgctgcctttaatgcaggatactttgtagataaggaatatacgatatttttcaattctttttctataggtcttatttcaacctcgtcactatactttacaataattttagaatcatttaatccgaatttatcttttatgaaactattgaaactttcaatttcccctagttcaatataattatctgaactaatttccatttccagcactttagttttcttacgcaagactacggattgtataacagcagtatttatgctgccagtggattcataatcactaaaagcttcatttattctcttcatactactcattaaccttttctaaaaaattttcagtatgctactattatatagattaaacttgcaatttgttaagcttcaaaaaaacgcatagaaataattctatcaaaaaagtattcctatacctccctcatatttaatctagataatatttatattatttttcaatctcaactaatttttcatttgtacaataattaatcaattagtagttttccgacatttaaggcatatgaacaaaaataacgagcccaaaataccataattatttttcattaggcgaaaaagcagattggactcatagcaagtctattagtgcaatttgctgatgaagcataatggaaaataagcttggtagatggacttgttatttttttgattatgcctaactatcattccataatctaataatgttgtcaaggcaaaagaatgtttgctaattctattagacgttgaattcactagtaaattaataaataataaaatttgcatacattcttcttagagtgaaactatttattttaactcagaatggcacctgccaaccgtttcctttattgccatagcgttctcattttctgatgaaataactaactgacttatgtaattattattaaatatctcacagtaaaattccttactcatttcatcaatttcttcataattttcacttaacttctttaataaatcctcttcaccaagtccagcattatctataaaataatataggttcattctatttacatattcttcaattcttttaaaattatacttatttacaacaaatcctattacataatctttatcagtttttttagttcccttttttatgctaataccaaacatagatacttctggtaccttctttatttcaaacttcttatatgctattcttgaaattcctaaattctctactatttcttcaactggaacctcatgttccacttgatttccaaaatacaacattctagagtctaaaactattaaacaaaggttttctccaatcatttcatttaaaacctttactttaaattcatcgcttttcttcattccatagtattccacgaaagttttaactccatcctcatcttcttcgcttcttacctttaatttattcccgccaaataaaaacatattttccttctccttcatcaagtgatatataacattataatatataactgcttgtttaataaattaaaaactgcagaaatttaaaataatattttaaattcttatgtaggtatctatagataaacaacttagacctgaacttatgcatataactcaccgaaaggacaggcactctgttgtttcggttactgagaataagttgaggctttctaacatcataagttgcaccatttcagcatactcccgagacaagctcgtgacaagcaaaaatagaacaacttatgatgaagaaatgcctgcaacatattctctaatgtaacactgcacaaaagagtacctgtcctttctgatatagcagatttttcaagctataagtataattctcaaattgaatatctatagataaccagactaaaacctgaacatatgcgtattcctcaaagaacaagccttgaactagcacatttttagggaaagtaggacgttgatgacgtcgctcaatcagatgaaatattctttaaagaaagccaatatatgcaggacatactcaatgtaatattattctaattatgttataattagttcaataggtaactaaaatataattaacaatagaaagaaaggatgtagcactatgtttaatctctctaaaaaaagtttttagttgatttggatgattctttaacttatccatcttcacagacaatctgcaaagctattgaaaaatattgtataagttcgaaagaaaagtgccagtttgtcagtaccgaaaagccagttacattctatttggaggataaattattttctactgaaatcactatggcacgaggtgggtatatgattaaatgccttgaaaaatagtaggtagataattcccctattattttttagtatatttcaacattgtaaaaaatagccaaatttaaaaatatcttgttttcataaacacaattaagcctatatttatgtgtatataaaaggaataattaaagtgctgtttactttaattattccttaaatttaatattttagtattatctctacttaattatagagttttatttttaacttcattatttattctttctattaaatcttctaaatttaatgttccctcatctccattacttctactgcgtaatgatatattattttctgctgcttccttttctccaacaataataatgtaaggaaccctttcatttctagcttctcttattttgtagcctatcttttcatctttctgatcaatttcaactcttataccttctgagcttaatttatccttaatcttttctgaatagctattaaatttatttgatataggaagtatttttacttgaactggagaaagccatgttggaaattttccagcaaaatgttctattaatattcctataaatctttctatacttccaaagactactctatggattactattggtctatgcttttctccatcactacctacatactctaactcaaatctttgaggcaattgaaaatctaactgaattgttccacattgccaagttctacctatgctatcttcaagatggaaatctattttaggtccgtaaaaagctccgtcaccctcatttattttatattcaagatttaattcatctaaggcacccttcaatgagctttctgctaattcccattcttcatcacttcccattgaatcctctggccttgtagaaagttctaaattatacttaaatccgaattttgaatataccttgtcaattaaattaataacgccttttatttctgattttatttgatctggtaacataaatatatgtgcatcatcttgtgtgaatgctcttactctcataagaccatggagtgctccagaaagctcatgtctatgaactcgtcctaattctccaactctcattggaaaatctctataagaatgtgattctgatttataaactaacattccacctgggcaattcatcggctttaatgcaaattcttcttcatcaattgatgaagtatacatattttctctataatgataccaatgccctgaagtctcccatagtttcttattaagcattattggagtttcaatttcaacataaccatcttcgtaatgtaattttctccaaaaatctattagggtattttttaatattactcctttaggaagcataaatggaaatcctggaccttcttctgcaaaagtgaataactttaattcttttcctaattttctatgatctcttttctttgcttcttctaaattatgcaaatgcacttctaattctttcttactagaaaatgcaactccataaactctttgaagcatcttatttttttcatttcctctccaatatgctccagcaacgcttaatagtttaaatgctttaatatactttgttgatggaatatgaggacctctgcaaagatctatataatcgccctgtttatataaagatatcttttcagcttcaggaagatccttaataagttctactttatatgtctctcccttttcctccattaattttattgcttcgtctctagaaatatcaattctttcaaagctaagattttcatctattattttattcatttctgcttcaattttatctaaatcttcattggataatgagttttcaatatcaaaatcataataaaaaccattatttattgcaggtcctatagcaagttttgaatccttataaattcttttaactgcttgagccataacatgagaagtagaatgtcttataacttcaactgctttttcatcatcataagttaaaatatttacctcatcattattttttaatttataatttaaatctactaatgtcccatttacttcccccactactgcgactttagctaagtttttactaattgaatttgctaaatcataaatactagattcatctgcaatttcttttattgatccatctttaagttttatatttatcataaacttgttacctccttctttacgattttataagattcttttaaattttatagcattagatatatctatagattaataatcgataacacaacttcttccaaattgcgcctcatacttttttaaattcatatatttttgtacaaaaaaagcacccgtcccaagccttgggacgaatgcataatatccgtggttccacccaaattgaattaaataaactcaattcttctctaaaatttttaacgattttcaccgatggcatttcacaaaatctgctaataaaccatagctccagggtagtttttctcatagtcatatttagaaatgcttacagtcggtgacatttcctctctgaaaactgtactctataatacttttccctttcattgcctaaaaatatttaattattaagagttacgtgcactttgctcttattaataataaatactagcacttttgtagtatcttgtaaatagcttttaccacaaaaaattttcttgcttccataaactcagttaaaaccatacttatgtgtatacctcaccgaaattaaatacatatttgttcctgcggactaagaaaatttcgctggaaatttctaaatggaaggttgcacccatttctgcatgctcctgcggcaaggaaactcgactcacatacgttcgctgaggaagttcgagaaaccaaatacaagatttggactctcacttcaaatagaacaaccttccattaagaaatatcaactgcttattttctaatgccgcttttcacaaatatgtattcaatttctccgtttcatatacacttaagtatggtaaatgctgaataggatactaagtataaattttgatttaggtatctacatatatatcaactttaaaaccaaatttatgtagtaacttatcaaaatcataaatattttgattacaagaaactataaaaatagagtagcttttacactactctataaaatgatttatttttttgatttattatttatagctaagcacttactatgattttgcttgcacttacaccagaattaattaaaatctgttttaatgtttgactctttacataaaatgtagcatttgtacaatcatagaatggattaattcctatgccattaggcatcttttggtgcgttgctatgcttgttacactatctggaatagttatgctggttaaatttgtgcagccttcaaatgcacttctttgtatacttgttacaccatttggtattactatgcttgttaaactaccacaaccttgaaattcattctcgtttatgattgttataccatttggtattgttatgctacttaaactgctacaaccactaaatgcactatagcctatgctttttacactatccggaattgttatgtttgttaaattaatacaattcctaaatatagcatcccccatatttgttacactatttggaatagctaacgttgttaaaccactacatccagcaaatgactgaggcccaatagactccacactatttggaataattatgctttttaaactcttacacccactaaaggcgtattcatttataattttcacactatctggaatagttatactttgtaaattactacatccattaaatgcatatctatctatacgtttcacactatttggaatatctacgtgtgttaagttactgcaattcatacacactatagattctatacccgttgtactatctggtattgttatgcttgttaaatttttgcaggtagatgtcgatgtaaatcttatacgttttacatcagtactatcgattttatttggtatcacgactgagctatcagaaccagtatattctactattgttccagttgatttatcaaatttaaagtctccgcttgttgtaagttctgtccatgcaccgctttcatttagataatacccatcaattgttgtatctttcgccatgtagcctttagaatcaaaataataccatttagaattaattaacctccagcctgtagcccatgaacttccttctgtataccaccagcctctaggatcactcttccactctgcactcgctcctattggatttagtactaataacgaagctacacataatgaactcgctattaattttattagtctcaaacttttcattctttaccccctatgtaatttatcgtacttaatacaacaatatacaattataccatatttttagtaattttttctattatttattctacaaacgattgaaaattgattaataaaaaacgtattttagtggtataacacataaaaaaaatcgtaaattcaatctcttgaataatacgattttacaatttgttatttaattttattgattcatgatttaagaaaaatataaaaagcaactaaggctcgtatatatcagcgctacactcatcacatctgccgtcattacgctcatattcctcttctgatatttcagtttcacaaatgtcacagacgaatatttcttctcctttatattcaaagttccttaggaattggtcattgtcttcctcgtcctcatgttgataatatgattttattttatttggcatcttaattctacctttctaagtttttactttaatacttcggattaatttaccattgttcatccatcttatttttatgactaataaatcatattataagattacgtatgatccttatattaatgcttgttatctaggttcatcggtactcatgctcctatatgttttaaataatgtaccaactttatcctttaaatcatagtaccctggatacatcataattgttggtttaacctcaagggcatttggtgttccattttccagacaatcttcattcgcatatactgcaacaatttctccaataaacatcgtaaaatcaaatataggaattgtctgtattaccttacaaagataatttacaggacattcttttatcattggtgcatttcctgcatcatcataaaacgaatcaaatacatttgatttatcttctttattaccagatacgcacccacaaagatcagtcttatagatagattcagaggatggtatatttacactgaagaatccattttctactacacctgaagttgtatagtgggaatttttcaatgaaatatacaatacaggcttctcacttacaacaccatatgcacctattgttgcatagtttggttttccattaaccatggcgcctgctaaaactgtaatgaatggtccaaaagggatatttgctattttcttctttatcatattctttctccaatccaattatttatctgttgcaacaatattaattatatggataaatccaaaaaaatatagactgtttcttttctgtgagttatcatatagatagataatgcccataaataaataatctttgcatcacaataacttactattacgttttatagtaggattgcgcattaaaaaaaatcgtaaattcaatctcttgaataatacgattttataatttgctatttatttttattgattcatgatataagaacattacaaattacctcaacgataaattggaatttatctaactaattaatatctatatcactacattaataaagcacatttatatatctaaatttaattgaattttaatccacatttttattatcattatcaaaattattagatttatcaaaagaatagaatctgtaatacatttttccaaagtttcttcctgttaataattcaaatagcttacctaaaaataaacctaagataattccaggcgccacacttgaaacatatgcaaaaatttctattctgctattagtattttcacaaagcatgagaactgccatagcaagaaaaatctgtgttatcaaaatacaaataacaactaaaacaagagtaagtataattttttctgttttcatataaaacacctctattcttatttttattctatttccaataattttataagttagatataacttttcaaatgttcatcaaacaattctttatttaatactattggtgttatgggctcgccataaaaatcttctgtttctccaataactttgcatccaaattttattagcatatttacggttacttctcttgcttcaatatataactcgtccgtatattgtctaaaaatctcttttaatgaatggatagccattttttgaccaagacctaaacctcgcagtctcttatcaatagcaaatcttccccatttccatttatctttttctttccatgttgcaacaaccccaataatatcttctcctactcttgcacaccaccagattggttttaaattgtcatcaattacaattgattctgctggaataccctgctcattaaaaaatacttctgttgctaattttattgcatcatccatataattttctgaaattttttcaatcaaaattctagaatcattctttctaagattgttttttaatgcaagaatacgaaatactttaaatgccctaacaatattgtctatatcctcgctatctcctaaatctaaaatttcattcataaatgtatttgctttataatccccatcattaatagttgtcaaacccaatggtaaaaggcaaatatctctcattctcttatcactttcagactttttcaattctaagtaattttttgcttccatattactaactattctactaagtgaagccttatcaatacccaggtttatcaacaattcattaaaaggagtctttccgttttgccttaggtagtttaatatgtgtgcttgtgcaagtgtcaagcctgaattaaagcaattgtaatttaataaacccaattctcttacaattaatcttatctcttttctaattacttcctctttattcataccgcgcctccaaattaattgatattgtcaactatattatctcgtttttatttttttgtcaagtcgactttcaaaaatgggtatacaccgagaaattataatctgtctactacacaatttagtagaattacgcattaaaaaaatcgtaaattcatttcttgaacaatacgattttacaatttgttatttaatttttttgattcatacttaagaaaaatagtgtattaacaatatacgtctatttgtaaacaaatcaagtttaactatcagatttctaattaatgtttgcattaactataattatataatgttaaaatttggcataccacaaaacttaatactattattttcgtaaactttacgcattgattttgggtcaagttaaatatcttaaataaattcttcttaacctttaaaaataaaaagtaaactaaaattaaggaaaaccatactccaaatatcagtacataaatatgaggtatcccataagttacaatattagcaacatcgccccttaagaatatattacggattataaaataattaaagaattcatttgtattccaaaataaaaacaagtataaaacataacatataaacttgttgagatttctgtaaaagaatattaacaatatgattatacttacagcaaaaataaaatttacaatcaaacctgctgctgatattaatattgctttatattgtattaattttgacaccttattataatcaacattttcacttattccaaacataaaaatttttgtactataattaagatcaaatggattgtttttaatatcaaaaaaatatgctgtgattgaatgacctaattcatgtgacaaagttgttaaacatgaagttatatacacaagtatgcatggaattacatatataataatctttttaaatctttccattttactccttataaacttattactttagttgctattaaattccattatatctaaagtataacacattttgtaaacatcatattattaaattttcaaagaatattttttattagttgttacgtcaattctacaaattgtgcactaaaaaaatcgtaaattcaatctcttgaataatacgattttacaatttactatttaattttattgatacataactaatgaaagttgcgaattaaggatagaaactaattaattttaaccttatgtatttttattaataataacagtctataagataatccccgcataatttacaaacttctgaattctgtctttcaagaaaccattctgaattctttttaatatttctttggctttttcctgctctccataattgtaataaaggcatgccacctcatacatcattgcttcatcagcacaagtgttagattcatcattattaatatgctctaataatttttcagcacttggaattgtattaaaaaatttaattattacattttcaatatcagaagcaacaacctcgttgaatccttcaccagtctgcttattatatctgctatctagtttatcttttaataactcctctttttcatcttttctagtctcggttagggaaactgcaatcaatctgctgttccataaatctaacatatatggtgggtaatgaaaattactcaacccattttcccatccaataagtgaatcagattctatattaaatattgttgcctcccatttcttatcatactttttacctatagaatcgtaaaatgaaggtatagcgatacatacctgtaaccaaaacctagcatgaactctactattgtctcttgaaaatttaacattgcatacttctgtaagaccatcacgcttacgataaaaagtctttccattttttctgaaccctttctctttaaaacctggtacaataacattatcaaaggtttcatggagcatttgtgcataattatacttttcagaaagactgtcaagataagggctgccataagaaaaatcatccatatttaatcactctccatctaaagtatatacattgactttgttgaacaataacttactattacgttttattttagtattgcgtagcaaaaaaaaatcgtaaattccaactattgaataatgcgatttacgatctgttatttaattttattgatacataatttaagaatattatgtatttattttatttaataccctctatttctgactttaatctattgaaatattcatccataaattttaatctttcttttccaatttcttttgctttatctgtatacaatttatcggggatttttttgaattttacttcgtattcaataaaaggtgtatgttttgaaacatctttcaatcttccattttcaactgtattgcctttaatatattcatctaaggattcatttactgttagtctttgtccaaattgtcctgctaacataaaagtgcgagcaattccgcttgcccctataacatcaagcttatctgaatcaaaaagtatttttgcttccattgtattaggttcatttcctgttctaaatctatgtgttataatacagtgctttattttctcgattttttcttcctcatattctaaagttcttaatatatcctccgcaatcacacttcctaaaactgcatggtcaatttctcctgttttatcttggctctcttctactcgtgcaatatcatgtaataatgcggatggaataagtatttccaaatcaatatctttttcatgttgtgcaattaataagcaaagattataaactctaaatacatggtctaagttgtgtgctgaacaagttaatttgtcttgaacaatttctataatttttttatgtttcatttcggtatccatatacattagccccctacttataaaatatttctataatatagaataccgaacaaatattcttttgtcaaattattctattttatatttacttaataacttaataatttactacatgccattttactattctgtactaattatagaatattttataaaaaccatattgctcaattttcagagagcatttcttaatttaattcacactttctacatagtacgcataaaaaaatcgcaaattcaatctcttgaataatgcgactttacaatttgttatttatttttattgattcatgatttcagaatgttatgaattaacataatcgattattttatctgatttttctttttgactttatccttaaccagccaggtaattgctataaagtaacctataataggagaaatcccgtatcccatcaatggaattgggaagttcccaaattgtgtagatatcaatataataataaaatatataccaatacacctggatattagttttgagttctttgggggaaagattataaatggcaatggtaatataactaatgatataactcctaaaacaaaccatatgattccggtattagctgcaagactaagtatttcttctacatatgatacaggtggtaatgcatctaaatacacccacgaaacaacagccattattaaaagtgctcctgcaatactaaaacgaattatattgtttctggtgttattccatataagaataatcattggaattataaatgcagttaactgcgaagcatctggctgtcttagtaaaaggagtgatacaattattgtagtaattatggtcaccctctgttttccattcaccaatcccccccataacttaataatcacaataggcaaaactatacttgccacatagaacttaattggtccaagagatatccatctatgtaccccttccattcctgaattaataagagttagaaatagtagtattactgagacaaatatagtgacgctctcagtattaatacctttcattttttcttttcttgatacaacaaaagatgaaatcaatccccctattaataaacaaaaaatattttgtccaacagtaaagacagcaacattgtgcaaatacattactatcactccaataatgactggaggcgctgcaattattagtggtataaaatttaataatcttacttttttcattacaaactccttaataacagttcacttaactactgttgccccttaagtttcatggagacaatataggaatatggcatacaaacttttttcatattcctattaccctctttacaacttaatatagttagtattataaattagacattataaattttcaatttaattcgcatttatttactattacgttttattttagtattatgaagaactgtacataaaaacatcacattatctatctattactatgataatgtgatatttaaatacgttattaaattttaaacaatacataaatctttttaatcaaaaataattctattttctttccttggctgtggtttaccatttttagatatgtaaccaagaggaatgatactatgacatttataagtactatctaatccccatttttccttacttttcttacctaattcagtttcaaatgttttttctcctcttgaaatacaaacagaaccaatatttatttctgctgcttcaagcataatattttgacttgcaacacaacagtcatgaattgcataaggataattatctggtgcaaataaataaattactacaggagctttataaaaagcacttttaatactatcatcatcagcaatacttccacttgatttatcgtttctccttgcagctccgaaaagttctctatttatctttcccaattcatcatttaatctcttatcttgaactacaacaaattttaccgcttgtagatttcctgcacacggcgcccataaaccagcctctaaaattttctctaactcttctttttttatctgttcttctttaaaaaatcttatagatcttctttcttttataacttctaaaactgtcttcatataatatcagctccctcataaaactattatataacgactttttttatatgaacagtacgcacaaaaaaagttccattaatagtttccacttactgcccaatatctgtacaattgttgcaacatcacaaacaagcatatcttctttctttatcataaccttaaccttcataatatctattaaataaactttcttttgtttaataaatattataacagatttttagatatcacattattcagttttcaaagaacatattttatttacttcaccaaatctacattatgcatatttatttaataattccacatgataaatttaattgcttacttgtataacactcgaattgtgaaaggtggcaggacttttatcaccatacttaacgaagacctgataatggaacaatctatacgctttgagccaaactccttgcaatatgtcttaaatcctatgcaatatggttataaagtcataatagctggtagtggtcaattatcttttacatcttaaatttcaaaattcccaaactacttagcatattagtttgaattgaattgtttgaatacttatttaaaaattatattaatattttgaattatataaagttaaccttcatataataaaaggaaacctcttgctcgttattttgatcttttagttgctctttatttataagtctttacacttttgtccattattttttgagctccctatttttagggagcctttattatctttatcatgaataatttcataaaatactcataaactaaggatgtctccataatcagatctgtactccattttcaatccatttaatgtgggaatatgatattttaattacgtattatttaagacatattaacgtataatataaataccccgcaaatattaattatcacatacatatacgcccctttattggggcattttttgtacccattattttaagtattgtgcagtacttaaataaaaaaataccgcaaattcatttctattgaataatgcggtatttcttctattttttatttttattactccataaataatgtaatcaagacatgactatctaaatatatttatttattttctaaccattctcgaaaactaaatgctaattcttgcatttcattaataaatctactagcatgataaccgtcacagatagcatgatgtacttgtattgatataggaataaatattttatttccttgtttgaaatactttcctgcagtaaaaataggaattaaatatgttccttcattatacacattcaaattaaatcctgtaaaactcacccaaggaatgcttgataccggaaatgtattgtcaggttcatttgatttcggagtaaacttcatgatatttccatagttttttatatcatcaagataatcactataaaaacgtaaaaaactttcgttatattccgtccaaatacttgaaaatgtttcgttttctttatgaaaaatagtatagctcggattcatactatcccaatatcctaaactaccattatgatcaaaacaaatacggaattctttatgattattaaccacagttgcaatcatataaataagtgtaggataaaatttaatatttttaagtttaatttcatacaataaatcagttatttctatattggcagtcatactataagtacatttcacattatttaaataatgttcaaagtatggctttctactccaattattaatatctattaaattaaaattcataattcgggcctcctaaaaattttcgtaattctattttagaaggcttttttccgtgacctagccatttcaatctcctttttacaatgatatttacgctttagtttattatagcacattctgtaataccgaactattcaattttcagagaccattttttattgattcataacttaagaatactacgaattactctaatattttactatttcttatctcttgttattttaacatctgaattactactaatattaatttttatttttccatccgcatttgctccaacattttttaaactatactttacttttgttaataaactatattattgttgaacaatatgagaaaagtgcgtaacatttcttattaaaaataattaggtatttctatctgtggagcattagtatttatatcccaagtattacgctgacaataagccattaaaagacttgatgtacgtttttgaaaattattgggtaatgcttcaaatttaagtttattataaaaatctgcaccaatatctgaatataaaaaccaaatatctataggaatatctctatttatatatgacatagtcttttctattaagtttgaaccataacctttccttcttaaatgtattggtgtagaaatagaaccaattcctcttatttctaatccagtaccacaattaagatgatttaagttatgtataagtaacgaacttgataaaaccttatcatcattttctaatacataccactttccatttgcatacttaatagacgacttacaatttaaaagataatctggcttagaaagaccatcgccccaagcatcataacccatcatgtatattatttcaaagtccttttcttctgcttcacgcaaattcattccaatacctcctgtcaaaaatacataaaacctgtagcaaaacttcatactaatatttattataatatattcctcggttgagacacatttttgtactattgtttatctatattataaactaacttttcaaccgttaccaatataatgaaataaataagtattaagaaaaatatattatatcattatagttaaactgcttatcagtaattcctattctctgtgcaggagttagcacatcaccattaccactcttgaaagtccaacaaaagttataaaatgttcttaatatagttatagaatatgggcatactttgggttatagttagagtaaatctttgatcgcccttttaggtatgagtgttcaaaaaccaaatatctgtatttctttccgaaacctgtagcagatgttttcacaagcatttttgcagatgtaatgaatttattacatttgttttttcttctgtaaaagttagtgtaaaaattaatataaattattacacaaatacctttaaaccattgatttaaggcaaaataaaagagtgcaaaaatcaatgtaattttgcactcaaatattattgtattttttgactttgcaccctttaagtaaacccgttagaatattctatacttatttttaaaaattttcagttaaaagttcttaattgtaggttgtttaactaatgcttgtcacaatgaaatttggagcaagcattagtgatgaaacctgaaatttagtactttcagcgatatttccatagtccttggaaataacactatttctgctttttaagattcacatgtttctatgtgattaagctgcttttttgataatgttcaaatatttctttcctttttctgtatcatatttcccttcccatttggaaataacgataacagctaatgagtttccaattatattaacaacagttcttgccatatcaacaatacgatctattcctgcaatgaaagctaccccttctacaggtatacctacagaaccaacggttgctaataaaacaacaaaggatgctcctggaactccagccataccttttgatgtaaccattagtacaaatactaaatttatttgcgtagcaattggcagatttatcccatatatttgtgcgataaaaagtgctgcaatcgcctgatataaagtagacccatctaagttaaatgaataccccgttggaataacaaaagatgtaatagctttcggacagccatacttttccatcttctccataagttttggcaaaactgcttcagaacttgctgtagtgtatgcaaggataatttcatcttttaaaatcttcataagtgatataatgcttgaaccacatatcttccctatcaatccaaatataacgaatataaagaaaatcatagctacataaacactaataactaatttacctaatggaatcaatgaagctactccaaatttagaaactgttacaccaattaatccaaatactccaagtggtgcaagtttcataatttgattagttacccaaaacattgaatcagccacaccttgacaaaaagcaagaacaggctttcctttttctccaattgcagcaacacctaaaccaaacataactgaaaagaatataactgcaagtaaatcaccttttgaaagagattcaaagatatttgttggaacaatatttaaaaatgtatctgcaaaaccatggctagatacagtttcagctgtattcatatatttttcgatactaactgacgaaagttgttgaatattaattccacttcctggatgagctacattagctacaactagtcctattacaatggcaactgtagttactatttcaaaatacagtatggtttttcctcctatttttcctacctgcttaatatcacctacaccagcaacaccaacaacaagtgatgaaaatactataggaacaactatcattttgattaatctgatgaatatatctccaataggctgtaaatatgatgctacaactggattgccataaaaagcagctcctattgcaatacctagcacaagccctagaagaatttgaaatgctaatcctaattttttcattttaatatcccccttctaaaatgctgcaacttagaattttctcgtttcaaaaacttactacagagaatatatttgataaaaccttataagtatttaaaaagacaaaattccaaatttaaacatacttaataaaaaaacaatagatttttattaaaaaaataatgttattttactaaatttcttattgcttttataatcaagcgctgacataatgtctcacttttgaaaatttatacaagaaaattcaatttccgcatgtattataacataaaaaatcatttattcctgtgtttttaaaattctgaataatcaaaaaaatccattttaagcttatcaaaatattcgttagtgcgacttttataaattaaattcattcaaatttcaactcaaatattatacgttaaaccctctattttagtaccttaagcacatatcacaagattctttcttgtaatatagcatctatttcaaacatctttatatgaattagaaaaaaatttttcatgtcaattaattaatatggagtttactatgtgctaagaacataaaaataaggagtgatatgagattaaaattatgaatctcatatcactccaaatgacttttcttgctatttaattttaagattatttacaaaatttattaaactgtttttaattcattgctaatagatttctttcctgatatacccggctctgtcatattaaatggatctaaaatttcatttagttcatcttcacttaaaagccctgcttctaatatcaaagttctaatagatgtccctgtttttatagcttctttagctaagcttgcagctgttgaatatcctacatgtgggcaaattgctgtaattattccaacgctgttttctactaaatcacggcatctttcttcattggcagtaatacctttaacacaattatctatgaaagtttgaactgcataagttagagtatcaattgattgaaataaacaatagaatataattggttcaaatgcattaagttctaattgtccaccttctgctgccattgtgattgttgtatcattacctataatattgaatgccacttggtttactacctcaggaataactgggttaacttttcccggcatgatagaggaaccattttgttttgctggaagattaatttctccaaatcctgttcttggtccagaagacattaatcttaaatcattagcaatcttagataatgttactgcacaagccttaacagctcctgatactgctacaaaggaatctaagttttgtgttgaatctattaaatcaaaagcttgtataagatccattccagtaatctctgatagatttggaacaactcgtttaagatactttacgtctgcattaactccagtacctattgcagttccgcccatattaagaactcgcatctcatccatagctttttccatacggttaacatctctcattatagctactgaataagctttaaattcttgacctaaacgaattggtactgcatcttgcatttgagttcttcccatttttattatgtgatcaaattctatggctttttgtgaaaatgcatcatgtaatctatatagctcactttgagcatgttccaataattttaaagcagtaatttttcctgcagttggtataacgtcgttagtggattgtccgcagtttacatgatcatttggatgtacaatagaatattctccctttttacctccaagtatctcaattgcacggttggctatgacctcattagcattcatattaagtgaagttcctgctccaccttgaattgggtcaacaataaagtattcatgcagatttcctcttaatatctcatcacaagcttttacaattgcatctgcaatctttttgtctaaaactccaacttcacaatttgttatagcagctgctttctttatatacgctaaactatttataatttctggatgcatgaacaatccagtaatcctaaagttttcagcagcacgcaaagattgtacaccataatatacatcttcaggtatgtccttgcttccaattgagtcgttctccttacggaaattgatatctttattttctaactttatttcccttatcataaccttcgcccccacattataatcggcacttcttgtataaattattggtttattatcaaattcttctaattcatctgttgacttaattataagtgtcctctacaatataatcaaatacatataacgatataagtattatagatttttatttatatgtggaggttatttatgtttaaaggtatggaatatgtgtatgaggttaataaggaaaaaagtttttcaaaagccgctcaaaacctgtatatttctcaaccttcccttagtgcaactataaaaaagatagaagagcgtgtaggttttcctttgtttgaccgaagtacaaatccaattcaattaactccttgtggacaggagtatgtaaaatgtatagaaaagattcttgatattcaaaatggattcgagaattttttaagcaatatgaacgagttacgtactggaaatatagccataggcggaagtaatctttttgcttcttatattcttcctcctataatcacagattttagagaaaaatttccacttgtttctattcatatggttgaagctaatactgcgcttttagagcagcaactcttctctggtgctttagatcttgttatagataattatgagtttaacgaaaatatatattctagacataagtactgtaatgaaaacttgcttttagctgttccaaagaaatttgaagttaatagtaaaaccataaattatcaattaactgctcatgacataatgaacaataaacatcttgattcgtctacacctagtgttcctttggaactatttaaggatgaaccatttctatttttaagatctggaaatgatacacgtaaacgtgctgagaagatatgtcaacatcataacttttcaccaaatgtgattttaaaattagatcagttagttacgtcttataaccttacctgttatggaatgggcatcagctttttaagtgatacccttataagatatacaaaacctgaccctaacgtaatctattataagctgaatgaggatagcatttgtcgtaacgtatatttctacaccaaaaagggaaaatacttcacacgagcaatggaagagttcttaaaaatggctatacctgaaattaatgaggatataacttagaattatgtggtaaaataccgaaagaacaggtactctgttgttccggttactgagaataagttgaggatttctaacatcagaagttgcaccatttcagcatgctcccgaggcaagcccgtgacaagcaaaatagaacaacttttgatgaagaaatgcctacaacatattctctaatgtaacactgcacaaaagagtacctgtcctttctgatatagcatatattttatagtataaatctagtttgtaattatttaacgtacgtagatagttgttattcttttcttatcatttttacaggggaatattccccacatttagggcacttaacatgtaatttcccattaattttataactattaagttgattttcaaaaatatcaaatatatgaaaacattttgtacattgaaaattacgtttttctttatatttagaatctatcaataaaataactggtatagccaaaataaaaaaaaggcctactgtaattattattgccgtactcatttaattcactcccatattaagattattaagattcttatgcctagattactataattactattatttatccaactatatattaagtaacaataatcttgttattttattgtgtatttatttcatatctatagccgccttttcttggcagctcattttcaaaatcacaggctgctacagcttcatatcctaatgcccataaattttctaataacattgatacacttaaaatatattgctcttgtttaatatcacctataggttctatttcaatgtaataccttgagtatagaaatccatcttgtttttcaaatcttaatgattcattgaaatcatcattttttcttaattccaattccattgaatttgaatcgattgtccatctttctgtggttcccaacacaatatctttaatagagcttaataaactaagtctctcttcattagtatcaacaaatactttgcaaaataaattttcataactattcatattttgtatttagtgagacattatataagtattgaacactcactaaaactcgccccttttcttttcaaactattttattgtgcaataatgttaacaacttcgctgatagttcgccatatatgaaaaatgttaaaattatatatataatttcattaaattcacttatgaattcttcttcctccaaaagctgaaattgttcttgtccctgcaatatactttccaccttgtaacgttccttttggaacaaatatttcgtcacctggatttaatacaatttcttttccatcaataattgctgtgtactgaccgcatacaacaacggtatattcatcaaattcatgcttatgttctttagaaactctatctgaatagcatgtccagaaagccatttggctaccgtcttcaccttcaaaataataaccatcaatgtcttctgtattttgttgactgctactgatatgatttttttcatttttcataaactccgggaaatccttcatgcttaatacctcctattttctatataaaaatatttattatatggcacataataatttactagcatccattagatcatagtttcacataaaacttattataacattaattacaaaatattacacacgccatgcatacatcggttatctatttttaagtctttccttctgatatatgagttcactacattactttgaactataaagttttcagcctttattatctctttacctttatcaaatatttaaggccattttacccacactccaatgctcacatatgctcttataccgcctaaaattttgtacctaaaaaacgatgtcgatattctaatataagctatcagggccaaaataaaaataccaacttttcttaaattgaaatgttggtattttattttggctgtattttaatgtgatgttaaaatatatactaaaaaattatatatgagattgtccactataatactaaatataagaaaattgtgaacttgtatcttttattttattataatgactgtgacctttattaaatcattttcctttggacaataatattttatcaagaatcatattaactggtacgtatattagcaaccataatcccaaatcaattaataattttaaatttaatattccttcagaaaaattataatgaaatcctgttaagttataaataatgtgagcaattataaacgttaatataactgtcaagatattcacataattttttttactcatttaattccctcctataattcgctttatttactatgttgcataaaaatttactgttacgtcttataaaaaaattggtactgcttattttttattgccgagatatgtatatcagtcaatattgatactaaagttccgcccaaaattgcatatccccacataggcatttctattttggtattcctaaaatgatgccagaaattgcaccaaatgcaatagtaaataaaattgatttccctaatctatgttttaagatcctaaagatttgcctctaaactaaatgtattcgtaattatttatactagtgcaatactcataaattctatgtattacatcattacttactactataacatattttgtaaacatcgtattattcaattttaaaagaacattatatgaattaactgatacgcattttctacatatactgtatttcaaaagttcatttagggaattttaagtgaataaatgggtgcatgtggtctaaaataaggccttcgattaagttttgcatagctggggggaatataactttaaatctcttttcattcgtccctttttagaatgaggcactaaaaaaatcgcaaattcaatttttgaataatacgattttacaatttgctatttaattttatccatttatcatttaagaacattatttattatgctttgatttgcgatgatatttcataaggtctataacacttccaattcccataccataaagcatgcccgaaacagtatctttaaaggcggtaccaaaaactattcctaatgcacaaccatacaacattccactactcattgtcttatgttttttaactgacatgtatattcctccaatctttaatttaaatttattacatcataatttactattacgtttaataataaaattattcattacttcaaccacacaccatgtccataatctatacataaatacaattattttttcttttttacgcttgaaccaatcgctaatcccaaactcataccaatgcacatgccagtaccaatatttttaaaaagcaactggcctacggtcatcccaagacaaatccccaggcacatacctaatgccaaataattatcttctcctttttcttctgaactttcattgttttcatcatcaatctctgtatttttattttccttatccttttcattcataatttcattctccccatattcctattatataaataatctttatttcacgataatttactattacgtttttttaaattgagtaataaaaataccgaaaattcacttctaagcaataaagcatttcaatcaattatttttcatatttttagcaactctagtccatatcattccaatgtaaaagcactatatctattatttattgtttatgatctctagcgttgcaaatatcatatatggtagaaacacccctgatactactgaatagatacccttcatattcatcacatagaaaatactcttcagtttcgaactaactaaaagataattttgaatttatttaattctctctgaaagctactgcatcaacctgaaagtcaattccatctctaataaactttgtttcaaatgcctttcttgctggatattttccttcaaatctctccttaattatttctcctaaaaacgataaatctttaatatctctaaataagcaatccatttgcactacagatttcaatgtcaagcctatcttttcaagtctttcactcaaaacatcaaatgcaccatttatttgattttctattgattgtccctcattcttcatgcaatagctgatataaacatgatttcctgcctcaacaatcgcagagtgcgcccattcttcgtctatttctgttcttataatttctctcatttaacattctcctcatattttattttcgttacaaattcctatttatcttttaattaaacaaacactattgcttcccataaatttactattacgttttatgatacatttagttctctttcaattactttcataaagaaaccatgacatctaatcccataatttttttctaataatggatgaccaatattatgagcaattccagtaaaacgatataatttattacacattgagattttattactcttctcgatctcttgtactttttgcgattttgcataagaaacaatataaaatgcaccattatcataaaaagtatccacaaatctaacagatggaatattatcatttgatgttgctaaagcaaattgataatcttttgcaaataacacttctagaatatttaaactattttcgtatgaagttatcttcactctctcctttatagatcattggtcctaactttaatcgcagttatgtcgtgttatattttcttatatttatacataatagttgaaccattatttttattaaatactggtggatatgttctatacccataaccaagcttataataaaatttatgagaacttttggaagatggaatttcaattaaattgctatcaaggcaccattcatcaagttcaagatgatgtactcagattacaaaaaatatctatcaatacctaacacttactgattttaaaatagtttttaaaaaacttagcaattccactaataatgatacctatgaattgtgttagccttccaaaaatcatcccaattattatcatgatcaatacaaaaactacacctgcgactgtttgcattgaaatccctctcttctacaactttttatctaatcattcatatttttagaaaatggatcatggctactattttcattccatgaatattcaatactttgactaatctctaatgctttttcttttcctactaagtcttctatcaaacccaatgccatatcacttcctgctgataccccagaagatgtatatatgttgccatcctttatccatcttgcttcttttacccataatacatcttcattttgttctgtaacccatttaaatgctcttttatttgatgttgctcttcttccatttaaaattcccgccttagcaattaaagctgaacctgtgcatacactaattatgtattctgattctttggacatgttttcaatgaagtttataaaatcatcatcattaactttttctcttgtaccacttccacctggtacaaataaaattttcaaaatatcattgtctcttgtgtataaatcagtatcaactctcactttttgagaactttcaataataccgccatcaaccgatataaaattcaatttaaaaatatccggtaatcgtccaaatatttcaacaggaccaaatacatccaatgtttcaaattcatcaaataaaagtatatcaactctataattcatgttatcaactcccctttttataattttaaaaacagctcacatcatcaattatccttgattttaaaagtgcggtccgcaactaaatgatacttatttttcataattagacattaatatcattaaggatcttatttctatatactaaatcatctctttcttcaaatccttgtgattcccaaaaagaatttcctaattcatttgtttcaaaagctaccaacgcgacctcactaattccttgctcttttaatgcctgaattgttttgactttgacattaaactcttttaatttaatatatattagagaaaggttacttaatttttcaaatgttattttcataaaaatattcttctcctagcgttaattcataataatttactattacattttattttagaattgagtactaaaaaaatcgcatattcactctcttgaataatgcaatttttaaaatttgctatttaattttattgattcatgataaaaaaaatattgtgtattaaatctatattatatacaaaaacattgcaacttcttgatcatgatatacaattcaatttattctttacttctattaactgttaatgatggcaattgcgatttagttttgctggcaatgccaaacaaaaagggctgtagctggtccaaaaataaaaaagccatcaatcgaagatctgtatccttttgcaatatttaagcaatctattattaaagaaccaacaatactaaataaaaaagcaattataaccaaaccaactcttctgattatcttaccacgtataaatttttctatatctacttttaagcagatattaaaacatattaaaaatgatactacatatgttgcaagtgctaaaaaataataataacttttcataaaaacaattttcctttcaataaataaaataatgtaataacattgtattccaattataacatattctccaaatattaaaatgtacgttttttatttactacctcataatttactattataattagattatagtccacataacacttattatggcattatttacaaaatattacacattcaatacatatatctgctatatatttttaagtcttttattctcatatatgaatgctatacattactttgaactataaagtttataggcttccataaaaacataataaaatttacttaatcattaataagtattgactaaaagtataaacggatatattatagataaatacagtctgtaatatatttgattaaagcaattatatttaggttataaataacttaaataatctctgctctaaaaacaagatttatattaataataaagttatagaaaattttaaaggagatgtttgtatgtcagagttttgggaaaaaaatttttcagaaaagcaagcaatgtggggttttgagccatcaagcactgcaattgtagtcgcagattactttgctgaaaataatctgaaagagatcttaataccaggtgttggatatggaagaaatataaaaccatttgttgataataacatggaagttacaggaatcgaaatttctcaaacagcaattaatatagcaagagaaaatggaattaataataaaatttatcatggatcagtatcagatatgccttttgaaaataaactctatgatggtgtagctagctttgcacttattcatttgttaaatgaagatgaaagaaaaaagtttattaatgattgctataaccatttaaaaccaggtggatatatgatttttacagctgtttcagaaaaagctccaatgtacggcaatggcacgaagcttgctgaaaattattatgaaacaacgtatggggtaaaactgtttttctataattctaagtctatagagaaagaattcggaaattatggtcttgtagactttgtagaaattgatgacatatataaggataacccagacaaacctccagtaaactttttaatgataaaatgcagaaaagagatataaagctggtaaagctaaacttttgtgcttacaataaaattatgtaggtgcgctggtcaattattatgacaaaaataaaaataccaacttttcttaaattgaaatgttggtatctttattttttctatgttttaatatgatttttatatgtagcctaaaaaatcacaagtgagattgtctacctatgacactcaatgcaataaaactacgtattatttaatttctgcaaaaatttcatgtatatttccatctgggtcagcaaatagtgctgttctttgattccaaggcatatcttgtggctcgtgaacagaagttgctccctttgagattaacgtcttaaatgattcatcaacatcattaggactttcacatgggaaagcaagttcaaatccctgtccaaatgactctttcctatattcgtcactatacacatacataacatctctcatacaaatagcaaaccttactccatcattttcaaattcaacataattaccaagatcattttcaattctaaatccgagaactttattatagaaatttttcattctctctatatcatttgtccaaatcgtaataagattaatttgtgctttcatagtatatttgccccctttcttaattcaacatatggttcgttttaatttacttatggcgcattgaaaaaatcgcaatccatgtctggataacaagaaatttcaatactattatttgcttttaacaatttattcaactttctcaaactactcatttaagaattttctcaaagctataatactacctatagctccaaggaatgttccaactattacaaatggccaaagcattgcatttgctataaattcaggttgcacaagagttaattctggaataaactccaatgctttggtataaacaaattcatatataaaaaatagcaatacatttcctaaaaatgctcctacaattcctataactactccttcaataataaatggccaacgaataaaccagttagtagcaccaacaaacttcattatatttatttcattccttctttgaaggatagacatcttaaatgatgttacaactaaaaataatgaaataactggtaatacaaaaaaagctgcaacttcaagccattttaaaactattaccatttctttattatctataaaaacagaatttctattaattgaattagatacaaaaagagtagcaaaatttttatcaactgacagtagatacaataaaaataatccaacaacaaaaagagttgcagatacagtaatcaccgaaaaagctgttattgtactatttctttttaaattctttaccgcatctaaaaagaaatatttaaatttattaatattcatatttcaccttctaaaattgttttagcaaatatattcaattaattacaattttaaacttattataccatactttataagcttttccccgttggatttttaaagaatattctctttctcagttgctacacactttctacaatatcaagtgtatatacttatacatactttattttacttattaggtacattagctgcatataaaaggtgtacttaatgaattactcaatttgtaatcagattctagttgcttatttttttctttatttattatataattttcctctaagaacttctaattgctctttaagtcttctattttcagcttgtaattctttaatctttctatctatagccgtcacattaattgcattatcattaaactgttaaataaatactaatgatagcttccggtgttagcttcactatgaaaaaacacgcaaaaacctgctaagaaaaatcaacacttttttagtaggttttttaaaataaatatttatatttagaggcatcgcaaacaagcccatcagatatcctgcttagctcagaaaacttctaaattcctaaaaatcaggtcatatatatttcttttaacctagcatagtaaattcttagaaatttattaaatgcagcaattttagctacttttttggcttttccctctgcttctttttttatcatatataaatatattgcatcatcttgaggcttattgctctttatacatttcataatctcatatccagtctttcgcaataacgaggaacctcttttggatattcgacgtttgtttccaacaaactgtccagattcataaggtggcgagtcaataccggcataggcaattaatgcttttttactatgaaaacgtcttacatctccaatttcagcaattaaacgtggagctagtgtatctccaactcccggcatttctctaacaattttatattcttctaaactacttgctagttcttgcatttgtgataaaattaagcatagagttttatccacttctcgaagaactcgaactgcttccaatactaacattttggtagatggggtaatggaagataaagttgggataccttcttgagctaaagcatatatttttttgcttttgcctcattttgattgtatccattattttttgcccattttaaatagcttcttataaactgcatttcacttttgttagtgatgttgtcataatgccagtattcttctacaaaagaacttaatttatccttgttaggtttgcttgatctactttttaataaactcttaatatctggcattgttcgatctaacatattactaagcaaaattttactctctatctgcatacgtatgtaatgagaatattgtctacctaatattcttaattctgaatacaattcatctgatgcatgataatcaaccatgcgaaaccagttatcaattccatagtttgctatcttaatggcatcaattttgtcagttttaccttttctaagcgccatagcggcatactttttcataactaaaggattgatcacagatacaaatatgccatgttctttaaggtagctaagtaccggaagatggtatccaccggtcgcttccattacaactctagtttcttcattaaaattcaagatacgcttaaccaatgcagataattccgtttctatatgagttaattcatatggcgtactaataatctcaccatatggttttaatatacatattgtactttttccttttgatatgtctattccaacgctaatcatcatttgcttcctccaacttaatttattgtaattgaattccatctgcacttattacaattcattttggttagttacacgaaagccataaggtttcaacctgcttaatcgaatctctataataagggatggctgacagtttttgcgacggatgtaggaatccaaaaagagatccgccggaccaattactcccttaattataaataaaaataagtgcaaatgtataaccatttatttatggtttacacttacacttatacagtaccaaataaggtataatataagctttgtttataaaaatagagtagcttttacactaccctataaaactatttattttttgattttgccttagttattgtttatttttaagcatttactatgacttggctttcacttacaccagcattaaccaaaagttgtttcgttgcttcactacttacataaaatttggcttcattacaaaattcaaatgcatctcttcctatacttgttacactattaggaatttttacacttgttaaattatagcagccttgaaattgggactgatttatgcttgttataccatccgaaattgttacgctttttaaattaacacagtcaccaaacacatcgcaccccatacttttaacactacctggaattgttatgcttgttaaattactacattgctgaaatacctcattccctatacttgttacactatttggaatatctaaacttgttaaaccactacatcctgcaaatgccctactctcaatagtcttcacactacttggaataattatactttttaaactactacatccactaaaggcatctgcttgtatatttgttacactattaggaatgactatgcttgttagattactacagttcataaatactatagattctatactagtcgtactatctggtatggttatgctggttaaattcttacaactagacgatgatgtaaatcttatccttttaacctcagtaccatcaattttatctggtatcactactgaactatcagaaccagtgtattctactattgttccagttgatttatcaaatttaaagtttccacttgttgtaagttctgtccatgcaccactatcatttaggtaatacccatcaattgttgtatctttagccatgtaacctttagaatcaaaatagtaccatttagaattaattaacttccagcctgtggcccatgaacttccctctttataccaccaacctgtaaaatcttgcttccattcagcacttgctcctattggatttagtgctaatactgaagctacgactaatgaacttgctattacttttatcaatctcaaacttttcattctttactcccacctatgtaatttattgtatttaataacataatatgcaattatatcatactttcagtaatacttttattatttactactaaaaactacatttatgaaaaaccaaaaatattagcctgaataattaattctgttcctatatctttctaattcctttttatattgatctgtcatatacctaacaaagtaggcttatattgaaagctctaagatcatgagggttttcacctccatatcagctttgcttttatataatattaacatctttttactgcaaaaacgccagcatattcccgtacaactgacttaaagctactaaaaattgattaataaaaaacgtattttagtagtatcacgcattaaaaaaatcgtaaattcatttttttgaataatacgattttacgatttagtctttaattttattgatccatcattaaaaaataatgcgaaataatttaattacaacttggaatttgggataataatcaatccactttctgcttacataataaacatggttgtatcttttctcattaacattaatgagacgtgtcgtttactagattagcaatagcttcaactatgcatttccacgttcctttaggcatatcatgtcccatgccttcaatcaaaagtaatttagcattaggtattgtacgtgctgtatcttttcctgcttcaacaggaaacaatggatctgcagttccatgaatcaccagtgttggaactgttaataatgaaaggtgttgtcttctatctccattagcaaccaacgccgcattttggcgtacagctccttgtggataataagaacgatcatagctttcttcagtatatcgtattgcacgttcctcttcaaaaggaaaccctttgctccaaagatttttccacatacgtaaagtataattaatgtatgcatctcgtccatttgggggcattgctgtaacaatcttcaatgtttctggtgatatttgtggattgtttggattacctgtagatgacataatggaaattaaactatatatacgtgaagggtgtttataagcaaaaacctgggcaatcatgcctcccatagaagcaccacagatgtgagccttctttatattgagcgcatctaataagccagccacatcatcagccatatcttccaatgtataggcgacgttaattgtttttccctcttgcgctgcctgatatattctttccatatcaggaataccagccgcatcgaattttgtagacaatcccgcatcgcgattatcaaatcttataacttgtaaattttcctttgcaagcatttcacaaaaatctggttcccaaaagtttagttgagcaccatttcctgcaataagtactatagtaggatttgtcttctccccaaaaatttcatattgaatttgtattccatttgcatttatgcgtgccatcgcatacatctcccttttgtatttttattattaatataatactataaaacgtctttttataaatttgtaaataaacgatcattatttatcattaattcactattacgtttttatagtagtattacgcagtaaaaaaatcacaaattcaatctcttgaataatacgattttacaatttagtccttaactttattgattcataacttaagaaaaatgcgaactaactaaacgataaattgaaatttaaaaattcattcatatattttatctaatatccaagcttttcatgaattaaaacaacttcatattcacatcctgtaggttttcgatataatacagaaaaatttctacatattctctgtgggcttttacagtcgtaacatttatctccctttaccgcacatggagtttttactcctaaacgttttgcattaagaggtgctgctatatttcttgctctgtctaaagcatcctcataatttgaagctattttattttcaccaataattaaataaactttatcatgtccaaaactgattgcagatacacgatttccagtattatcaatattaataatttctcctgtttcggcaattccatttactgatgagatataaatatctgcaaggtttgctttctttcttatctccatagcactcatgttttcaggtaatcgcatatgccagtacacctcattatgagatgctagggcatcatataatttcatttcctctactgtaactgagcctcctattccaatagttctattgctcatttgattagacaaatactttgttgcttcatctgcatgactaaattcacttacattgtaccctaagcattcgaggctatttttaagttttgtaaattccataactatgtcgctcctattcatactaaaatattcttgtgcttctcataaacaaatacctatttactattagttaaatgagtatcattacatcgcaataatctactattctgcattaatataggttcatacgaactaatattattatagcatattttgtaaaaaacattatctaacttgagcactacgcacttttttagcattgcgtaacaaaaaaatatcacaaattcatactgaataatgtgatatttcaatctactatttatttttcctatgtatactgaaagaaaactgtgaattaactcaataacacattattctcgttcatagaactatattcccaaattacttatttggctcagaatcccatccatttaacttactatttccattaaaaataagtttctgctcacttaaataatatacatcttcatctggataatatgccatgtcgccttcttctttagtaccaacatccaatatttccaatgtttcattcccggtatttatgaattgatgtgctatattttttcctgcagttttagcaataaagtctcccttttttattaaatattctttaccatccatcctcagagttccacatccactaataatcataaaaaattcttcttgttttgtgtggctgtgatatttagcacttttagctcctggtaatattctgtcaatatttatataaattttctcactaccagctgctttacccaaatatgaagtattagctttgcctagaaaatctattgtgtattcattaggcaaattattaatgtttaatatattaaccataattcaaaacatctcctttccttttaatatatttaatatgatattattatccttgaaatattatatcaaatctagctttattttctttaagaacatcttttttcacttactaccacgtcaaatctacagattatatatgatgttattccatggaagtaatatcatatcttatttttactactttatcttctgcattccaaaattcaattgttacttttttttcatggtctacatatccaattactggcgagctaggcatttgttcctcagtcctcttataatagttagtaccataagcattaatcacatcatcaactgagctccctaacccaatacctttacttgtcttcatattactgttggtttcactgttaataataactctaataatttgtctctgtttattcgtagcaatttttaaaccatcacttagtttatagtagtcaaatagtgcattgtcaattttttcaagatttgtcccgtatttttgtataaattccttactatcaatactctcatacatttgaatgccatctatattttcttggccaagagtcgttgttttggtaaacataaagctgcttgacctttggaaatatttataagcaccaaatataatacagcaaattaagagaaacatagtaatgataattttaaatatcttctttattgagaattttttctttataaatcctaaagtaagaactgtggctgttaacaaaaatatacttattataattccgataatactcaacgttgattctccttattattacatatttgcacttgttcattagattatagtgttacacaacacttattataacatcatttacaaaatatcacatatgctatacattcattatcagagcccaaaataaagataccaacttttcttaaactgaaatgttggtatctttattttggctgcgttttaatgtaattttgaaatatagcctgaaaaaattataagtgagattgtccacctataaaactcaatgtaggaatattacgttcataatcctaaattacttaaaatatgtttcaaatccattgttaacgatatatgaaccctttggaacttgaattgctactaaacatatattcagacagtcaacacaagagcccattgcatttaataagcacagaaatatagtgaatccatttaaccatccaaaaaaatttagaataaagggtaatacaactgacaacaaaatgaaaggcataatagaaataattaaaaatctgttctttttgactttttcagtagtataaataaatccgaaaaagccatttatcccccaatatatttgacttgatttaaatacattaggtataaaacaagcgtgaagaaattcatgtatagtcataaagatgaaaattgcaacaatgtatataagagtaaataaatttactgtgaaattaatactaaagccatgcccactactgctaaaaatttctttcaattgtggatataaataatatgaaatagcaatagatataaccccatttataagcataaaaggcactgatagtaacattgctatacacagattagagggttcttttagttttgtccatccctctgatattagcttaatactaacttccttatctgcagaaggtattttctttaaatatctcattaattaaaatcctttcatcaaaacataattgatttttattgaataatccttatttcggtaagttactacataaagctagatttatataaagaaaaatgcttcaactagaaagtagaaacatttttatgtagcaggaatttgaaaatgagagtcgaatttatgtggatatcaactgaagttgaatctatgcttgttccatatatgctcatgaaatatatactaactagaaataagaattatgctagttcaaagcctgcctttgatgctagcatattggacgcaacttgtgatattagaatcatccatcataatttccttagaaactggaacaacagcataattcttatttcggtaagtcactgaataaattctgtctaattaaaatctccatcatatattgcttttgccattgggaaaggttcaagtgctctttctaaaattccttgaacgtaccctattaatactccataatttacaattggtatttcatatttaactgcattaccaattcttgaaagcatagcagctctatttaacatgcatcctccacaatggatgataagtttgtatttcttaacatcatcagtaaaggaatttccagaagaatattcgaaattaatttgtttccctgtcatttgacgtacccatcttggtattttaactgttccaatatcgtcacattgtctgtgatgagtgcatccttctgagattaacacataatcaccatcttctaaactttctactgctttagctccttttacaagctccataagatctcccttatatcttgcttgcaatattgaaaatgatgtaagcattatatctttaggcgtatctgctgatgcttttaagaaaacttgtgaatctgttataacaagtttaggttttttctttaaattttcaagagtttctcttagctcatgttcttttgttacaatagctatggcatcactttcaattatgtctcttattgtttgttgctgaggaaggattaatcttcctttaggtgcttccttatcaataggtgtaacaagaacaactaaatctcctgggcttataaggtctccaactaatttaaatttatcttcattgtctggtattacgcttataattttttgcttaagctcatctattccatttttatttaatgcagaaactgaaacaacagtagttccaattgtcttttctatctcagctaattcctctttttctatattcttcttatctgccttattaaaaatacaaattgtaggtatcttcttttcctttatttgatctattattgatctatcattttcagtaactccaacagtagcatctaccactactaatgcaacatctgtttttgataaaacttcaatagttttcttttttcttgactcacctaattcactttcatcgtcaagtcctgctgtatcaataatcatacaaggtcctatcggaagaatttctatagctttataaacagggtctgtagttgtccccttaacatcagaaacaattgaaatttcttgatttgtaagtgcatttataatacttgattttccagcgtttgtcataccaaatagagcaatatgtactctttctccagacggtgttgtatttaaactcatattatttctcctttgaattaattttaattactcaaaaatatttttttaagttgcctattctattataatataaaatataaagatatacattgcaaaataattctttatttattgatgctttattatcagtataaaaatattaaggagtgttcattttggattatagattagaacaagatgtattaggtgaaaagaatattgataattctacatatagtgggataaatacagcaagggctttggagaattttgatttaaacagcaaaagtgtaaatttaaatttaatacgagaaattgcccttataaaaaaagctgctgctatgacaaataaaaccttaaaatttcttgcccctgaaaaagccgatgcaataataaaagcaagtgaagaagttatagatgggaaatttgattatgaatttaaactaagtgcctttcaaggtggagctggtacatctactaacatgaatgtaaatgaagttatagctaacagagctattgaattattaggtggagttaaaggagactacaatttagttcatcctcttaaccatgttaatatgtcccaatcaactaatgatgtttacccttctgcccttagaattgcagcaattagattaataagaaagttaagtgattctttatcaagtctgcaggaagctcttcaaattaaggagaatgaattttcagatataataaagcttggaagaacccagttaatggatgcacttccaatgactgccgggcaaagctttggagcatattctaaagctattgaaagagatagatggagaatatacaaagtagaagaaagattaagacaaataaaccttggcggtactgctataggtacaggtttaaatgctacaaataaatatgtatttatgatgacagatattatccaaaaccttactggccttggaatagcaagatctgattaccctatggacattacacaaaactgtgatatattcgtagaaacttctggacttttaaaatcgtgcagcgtaaatcttcttaagatttcaaatgatttgaggctccttaattctggacctcgcggtggaataggagaagtaattcttcctaagatgcaggcaggctcgacaattatgccaggaaaagttaatcctgttatccctgagatggttgctcaagtaagcttaagagttatttctaatgacagcgctataaccatggcaagttctatgggacaattagaactaaacgcttttactccacttatagcagaatgtctacttgaatctctagaacttcttgaaagaagcgtcacactttttaaagataaatgcataaatgatctaaaaatggatgaggatagatgcttagaaaacctagaaaattccttagtttctgcaacatccttagttcctcacctaggttatgataaagccagcttaatatcaaaaaaagccttagccactggaaaaaccataagagagattcttctagaagaacaaatattacctgaagatatcattgataaaatattatctccaactgaattaataagaacccatatcccaggaaaataaaacaaattgaatgtgccctttaaagtatatttttactctaaagggcacacttttattttaataataaaatcttggaatattcctttcattatcaaatccaggtataactggtggtctaaattcattcattccaaagcttctgcttgattcagttgtattaagttctgcaagttttgttactccaacataaatatctgatatcctataccatgttgcataatcaactactcctgtttgaggtaatgtaaatatttgttgaaatgttttaactgctgcagctgtctttggtccatattttccatcttcagctatcttaggaatgagcggataatttcttgctattctgtttaattgaccttgaattgctcttacagctggtccagatgacccaagtgttaattctcttcctgggtatgacattggtattcctgcaaccttctcagctgtagttagttcaatattattgccatagtaacgcgttaatatatcatatggtccaagaccttggcgtgataattcctgacttccccattgacttaaccagttaggacaagtaacgctctttccatcgcaatattgtgcaaaaagtggctgcttctttccaattcttcttatatatgttgagaaaatttcatctacaatttcacttatgttatcataaatatttctaccataattaaatgcttgatcataagctgtagaacttgtaatatcgaaattttttcccttacctctataccattcagtaaatatcctatttaatgtaaaagatacaatacagaaaacatttgctcttatagctgactctgtccaagttgaatatatttcgcatgaagcaacatttttaatataatctttaaatgccaccttataatttggtgctgatggatcatttggaccaccttgatgaacaatgacaaattcaggcactacaggctgtggtaatacaacccctgaagttggcggtggtaatggcttatcttctgcctctggtatcttaggaggaaaatttccattcaaagtatttggcagtatgtctataacttcttgtctcatagagcctctgcctaaattaggttgcaaattacatatctgatatgcaatttctgtaggaaacacttggcatcctcttattattataggattaaacccttctctctcaacagttatatcatataaactataaggtatttgattactattaggatttaaggaatattccaatggtggtgctggtagttctataatattagttaatccaactacatcagtaactaactcaatggttctatcattacctaaagtagattgtcctcttactgttattctagctctatctactggaatataatcgtttcctctgaaacattgtatcttcaatccacctatttttggtgtagcacttccagtgcttgatgttgttccagtatttgctggggcacttcctgtaatgtttcctgcacctaatgtagcacctccagtacttggtgttgtaacattcccagcacttcctgtagcgcctcctgcacctaaagtggcacctccagtcgtatttggtatcatattttcaccagtactacctgtaacatttccactacttatattctccataacattcctctttctattttttcaagatattatatttaacaaatgcaatatttattactaaaaaatataattatggttaataattatttactgaaagtgcataatatttatgtactcttaatatctttttatgtgaagcctttaataagaaattttatattccagcttaatttaattgaacttatataggacacgaaggctatgaataaacgaacctctcttcgagacaaaatggtagtgctggtggaaaaaccacgcaaaatacccaataaatctttggttcattattatctttcatatgcctaaaacaaattttagctagattatacaaggaggtgtattttttaaatgatgacacacaaattagatgcaaaagacacgctcaagatagaaaatgaaaagagaagaaaaatattgccacctgaacagacacttataaatcttgatctgcagactggagatgtaatggctgatataggctgcggcattggatattttactattcccgcctctaaaattgtaggaaaaaacggtaagatattagcacttgatatatcagatgaaatgctgcaagatgttgaagaaaaaataattgaaaataacatatcaaatgttgagactattttaacagaggaaaatcacttaaaattagaaagtaattcagtcacatttgcttttgcaagtaacataattcatgaagtagacgaaaaagagagatttttaaatgaaataaaaagaataatatgcccagaagggaaaattgctatacttgaatgggaaaaaattgatagtgattttgggcctcctattgaatgtagattagacaggatggatttaataaaactattagatgaacttaatttttcaactatatcaactatagatattggtgaagacttctacggaataatcgcccaaaaataaatcaatttctattgatatccaaactttaaaactacatttatgtgatatcttaccgaaatcataaatattttgattccgaaaagctatgaaaatatcgctgaaggttctaagcagcaggttgtatccactttagcatgctccaactttcagtttgacatgctgaaatggaacaacctacagctaagaacctttagcagctcgttttcaaatgttttctccacaaatatatttatgatttctagtgaagatacaaacttaaagttttagcaactttgtgaatatgttcatctaataaatttaatttttaaattatttatctataaaaatagaaaagtacaaatagaggatataataattctatttgtgcttttcttacatataggttttcacaatgatattcaaacttatgaaatttcaacagtgctattgtttaggaaattcaaacagtggatatgtattattatcaatattgaaccctatatagataacacaatcataaactatgaaatatcttctatacagaaatgattaatatacttttgtggaatgtttcattggtaattttgatggatgtgattctttggctataagttgttccaaatgtgctagttcaaagcttgttctttgaggctagcactttgggtgcaactttatagccttagaatcacccatcagaattgcctagaaactggaacaaaagtatgttattcatttcggcgagttatatgcataagtatagatcacagttggtttatctcctgaaatatattcaatactcgaaagtagaaacatttttgcgcagcaggcatttaaaaatgagatgttaaaagtgctttattgtaggttgttctaattgtgcttgtcacactgaaagtgggagcaagcacaattggcgacaacctgcaatttagcactttcagcgaaatttttatagtcctgcgaagcaacaatgtttttactttcggttggctatatgtatgattctaatccatacttggtttatctatatttatatcacaaaaaaagagcccctctttataagaactcttttttatctagatctctaatctagcttaattgaattaaatggctatactcgtccaaaatagaatctaattgttgacttgcaacaattacctcaggatcgaacaaatcaactttttcctttattatatttagaaggttttgttccatctcataaatttgcctatctattttgtttatagaatccataattaattctcctttatttgttaatatctttaagaatttttttataattttatcagataaaccagtaaggtatgttgccaaaattgctgtataaggagggtttgcttctattttctactgatttattttaatttgttttgacactaatatattaaccttaacttacacttatactctttaaaaatattagaaaaaatagtattaatataacatcttgcctacgtttaaccaatttcatacataatatcaaatataaaagtaaatttatatcttaaaaataagtgcttatgagtagtcattaataaattaaaacaatctatcctaaaaactctatttttactaattataacttgaatatatattacaatgtttcatagactactcttgatacaacattcaaacttattaaattgcacccccggccattattcttctcttttaccagccccttattaattaaggggctagttttattaaattatatatttttaaatttatagaattgttgtgcctaattttgaatattttattcatttgagggcaagctattttcatattaatttttgtaaaaaggagaattttaatgaacaaaatgctatttcaaactcgtagagaaagaattatatcatttattaaactactaaataaagatcttgatttaagttttactgaaaaggagatcgaagatgataatttcacagatatgcctaaaaagaataatgttatcccatttaaaaaagttgaataacaatgtatctatatttattaaagtagtccaagatatctaaatataataagcaaaaaagagtgccaattgttgtttgttatatgttaaaaaacttaacaacataatactcactctttttttaatttattaaagaaatattttattacggtaatcttctgaacatttcatttcctttaatcgttctattacggagctgtctccccaaaaatgcattggaaacactttatctgtattagtgtttttcatgaaataatcaaatcctaaataaaattcttctccttgtctagggtctaaaactacaaatgcagcatcaaaatgtcgattctttatcttattaatttcttcttcaaatctttctcttgcattttcattatccttttgatctcttccattccaccaccataaattaagatctcctgcatgatagattgttttatcttctgctgttacaataaatgctacgccctcatctgtggaatttaaagtctctattttcaaatttgatatttcaagagttttattaatatctataaattctattttttcataaacctcatcatcaacgccatgagtattaaaaaattttctaccaaatttctttttgatatcttttgaaaaaatgtacacaacatttggatatttatttagtaactgaaaaatatctatattaaaatggtcatggtgattatgacttgaaaacacgtatattgtcttttctggatcaaaatctggaagctgacctttaaaataatcaaatatcaaaactactttatcaagttcaactaaaaaacagctatgttcaacatatgtaatattcatttgcatcatccttttttataaatttcatctcatgctctacatccataggagtaatcttcaccaatttaacttaaataataaattccttaagacaagcaaaatcactggcgaatatattttattttttactctctatcaaatcttaacttactaatcttaaataaatcctatcataacaactataaatatcaaaaataaaactgctaatccagtaaccaatacctttgctttaagcattgaataaagtattttgcaaaactcttcttttagaaatttagaaaatacacttattttttctttgtagcttatataaagaagtattaataatatagcgattaaaactgctattaatagataccattttgatatttcattatatttattccagtttgctccaagaacccttcccaaagatataaatgtagtagtccatattaatgcacctaaatatgcactaatcgcaaacttcttatatgataccttagtcatgccagaaaagtagcctgtaatatgccttattcctggaataaaatatgctacaatcagcaatataccaccatatttttgataccatgttgaaatcttatccatcctatttttatttagatgaatataagatccataattctcaattaattttatttctaatgccctgccaatgaaatatgatatagtaatacctattatagccccacttgtagccactataatgctgagcagataactcattttattcatataaacaacatatccacaataagtcattagtgcttcaccaggcaaaggaaatgctattaattctaacactaaacttataagcactgctatatatccgtaatgattaaacaattctataacatgatccaatactctcacttccacggcttaataattttctgcatacttccttagcaataaatcttatcttaattctccatattttataaagagtcgcagacaaatatgatttatttggaattaatgcatttattatattactaattataacctcttttcatttattttgcatagtttaatcatttagcatatattcctttaaacattataaaaagccaacagaacaaaaaatataacaatgttatattgctctgctggctttttaaccgcaaggggatagttattatattgcgaagaaatggttttctattattctatgttactaattactttaaaccttgttcgtagctttcaatcatgtgcttaaccatgtatccgccaacgtatccattttgtcttgaagataaatttcctttatcttgattttcgtaatcatgtaatcctacttctgaagcaacctcagtttttaatctgtttaatccttgttttgcttctggtactaatgttctgtttcttccactattatttgatgacatatacatctacctcccttaattaatattttgtttacagtaatatattaaccagtatgataaattataatctataaaaatattaacaaaagtagtacagatagcttgtattagataactttagataatcttatgttttactttgaatcctttgccatcatttatgatatttattcctaaaatatcagtgaattgtttaagacttttcatattatttataaatttaacatttcctttagcaatcaatttcttaattacttctattatgtcttttttttcagcagaacttagttccatagaattacttagaaactctctattaatataagttaaagtagtccatgcctgctcctctgatatactgtttatatccattaacacccatgtaaaatcttttcttctactattttcaggatatgcggctttaaaaaattctataaaatgatttattggcttgggatctttttctttaacatactttccaagctgtgattttaaactattctttaaatacattattgtattaggctttatagcatcctttaaattatcaatttcagtataaatatctaaccttgagcatttaaatttctattattaatcattttttattaattacgttgtagacatatctaaattgtcatatgcacgatttagagtatatcctcttcccccaacttccctaacgtctgacactgttataaaagcgctataatcaattttattaacaatattttttactttttgcagcttctcagctggaataactgtgctgatagctttagcttcaacttttgagtatcctttttctgcatgcaataaagttactcctgtatctgcctctgagataatagccttttttatttcatcataatgatcgctcataataactacttgtatcatttcttttccaaaagttaaagtcttatttaacataaaataagttaaaaatacaacaaccagaccatacaatacattagtaacacttgaaaatgtaatttgcaaagttaagatgcacaaatcaattacatttaaagtgatatgaactggagtattaaattttttatttattataattcctataatatcaattccaccagatgatgcatttgcttttaatataagtcctgctcctattcctattaaacatcctgcaaggacacatgctaataatatatcattacaataatgatgcagattttcatgcttttcaaaaaagtccaaaagaataggaaataaaaatgtagatactaaagtagataaagcaaatttctttcctaaaaaaaataatgccgataaaaataatgcaatgcttataatgtacacaactattgtcaagcttgccccagtaaaatgatttatcactcttcctaatcctgtaactccaccaacaataatattattttctaatattaatgtgctaatagcaaaagctattaatatatttcctagaagaatgtaaattaaactattgatttttcctttcatgttatcaccccaagacacagaataccataatacttgaaacaaaaatgtaatctatgttacaatctcataaaagaaggtgaaaaatttggataaaataaaaattccagaagaattgtattattattttgaaaaagttggaaaatcattaacatacaataagaatgatattatctatatgcaagatgataacgcaacccatttatacttgataaaaaatggtcgagtaagagtgtattcttcttcaaaagatggcagtgaaattacaatagaaatagttgaaaaaggcagaatatttggcgaatcatctttcgttcaaagctcaaaacagcctactacagtaagcgcggttaatgatgttgaattgatttcttgttcattagaagatctgtatccttacttaactcaatcaaaagaattaatgattctgctttttcagttgctttcaaatacatgtaatcatctttcaagtctgcttaaccaagcttacttttataatcgttatgaaaaagtagctaattttttattgcagcagacagctgttcctaataaagataaaaatataagcgaagattgcattccttattctcatgaagaaatcgcttcttgcattggcctaaatagagttacaaccaccaagatattaaactactttagcaaactaggatatattaaactaaaatataaaaaagtaataatactacaaagagaagctttaattaaatatgtagagtaaaaggctagaattatcttaaaaatgggctatgctttaatataattttgaaatatagcctataaaaattataagtgggatttcccacctacaatacttaatatatatgaaaattatgaaatatttatatatatgtctttaaagtgtaattttaaatatttttcctttcctatgaaataaattattatcactataacttgaatattctcctacttctatccccaaacgattatacatagaaaatacctttggatgacttgattttaaataaattgctttataatgtttagatttataatattgtattatgttcttcaaccacatttctccatttcctctgccttcttgggctatatgaaaatagttgaatatcaaaatgtctttatcctcttcgtttatctgtataggttctttaaaaaacgtcttataatcaagaatgccactactaacaagagcaacacctaaacatttttcgtctttcttcataatatgaaagtccatatttatattttcattgctttttacattctcaattaatttacaacaatgataaacttcattataatcatcccactcattttccgctttaaacagtaaattttgtattattggtgcaagatattcgcttttaaattcacttgaaactccaaaattaataccattagttttactaataatcttcattaacgaacctcctttttaaataatgctcttaattaattgctattgcttacttgattatagtttttttataatacttattgtaacataatttacaaaataccacatatgccatacatacattggctttctattttttaaatctcttactttgcaatatgactgtgctacattactttgaactataaagtttttagcctttattatctctttatctgtatcaaatatttgaagccatttgaaccacttaacatagttacttaggtattttgttgcaacaccattgaacctgttcatccatttttttaaattgctatggagagcattaataagttgaatatgatataatccttccttatgtttacctcttttacgagagcgtcttagcatattaaaaggttttgtgcctttaaaactttcagcaaagaatacttcatctgcttcaataacaccatcaacgtatcccttacctaaaaatgtgcttatacaatcaagaagataatatcttgattagtaacaattgaaaatgggctatggacaatttgagagtgaaatttcctttagaatcctcccttgttattttaaagtatactatttcaaatctaccatcaaacaataaaaaaagaatgtagtagatttgttgtacacaaatctagctacatacgcgaatattgtggtatatagattctttcacaattacaaaataataaaaatctaaattactatactgtaaatgtataacatttactcctttgtcacgcgcgcaaatgtctcattccactcttctatctctatccttttatacaaattgtcattcacataaattgctacttcatcatgattcgaatcttctatctcttcctcaataaaaaatggcatcactataggaatgcaatactccccttcttcttcaggcttacgtcccattttaataaaaagttctgctacgcctggatcttttatatgcacaatatcgcctggatacgtaccaactattttaacttcatcgcatggcgttggcatctcacctgtcacaaatatataaattatcccgtctcttctatatgcagtagccttttctaatgctctcatcattgttctatatggacttctatcaaacatatctttctccaaagaatttattaataatttatattatgaatatgactcttaatagttgcttatcatgaatatttcttaataaaataccacaacattcatgagtgttgtggtattaaaaaatatttaaatgttatctaaatcattaaaatatctgctcattttgctcatagctaatttctttgaagctcctgattttcgccactcttcaacctgttccatggcttcattaggattctttcctaagccaacaagtacacctgataatataaattcttgatacaaatgctcagaattgaccccttcttttgattctgttaaggcgcgattaactagtggagcaatatagctaacccaatcatctggattaagatcatttgtgttatctatattttccgtaataactgtatcttgtctcattaagcttctattcatagattcattatttccaatactatttaatgtaaatagataattgtattttgaagcatgctttaattcgtctgtaattatatcaaataatacatccctgtaaactccttcaggaagtcctctcctaataactctatatctttctactgctgctagctctccaaataaagctttcttaataccttctaaatatgattcagggacctcaaaattttcttcttcaccctccattgtagcatccatatcacctgtaaaatcttcatagatccctctaaacaacatattatgtctgcgctcatcatctctaatagatgatattatttctttctcttcatttgttggcgcttcactaataagataatcataaaacaattcatcttctctttctccttgaattgctttttttaccccctgaattgctatctgtaactgatcatcattgttcatctgataattattactcatttgactattattgttttccataaaatattattgattctcctacaaataattgactcactttcattgtattaatttataattcatttgtgcattaagatcaataatcccctagctatgccaataatataaattatctcaattcagtatacttatcacccacatttccatgtggtactagcagtcaataaaagttactttaaaaaacaaaatttatatataaacctattttgaaatataattcagtttaatattatggtataatttggtttacataacttgtatgttaggagttattatttatgagaaataaaaagaaattttcaatattgcttttttcaattttattaatattagctttaggaacaggatattacttatatcataaacctggaactttgaatagttttttattaaataattataacaaagaaaatattgaacaaatagagattagaagtacactttcgagacaagataaatcaattaaagataaggctaaaatcaatgaaattttagctaatgtttccaacataaaattagttcgacattatggtagtacagcgaataaaacaaagggtgctattcatatttacatttatgataaaagcaggattactactgagattatcatacaggggaaagaatatattaatattatcaatgactatgataactcaaataaagagtataaaatcattgataatagcttagatttagattatataaatagattaatttcataaaaaatcagcaccatgcagcagctggcgatattactatcggataaaaaatcaggcatacattggtctaagattagtatgcctgatacataagctgctatgctattacaaaattcaaattaactttctgtttctgtaaaatcatctactgggaatattattccacctttatgcctagcaattgtttgaacttcactaactatcaagctatgatctagcattttataacatctttctaaatcattatttttgacagcttctgaaaattcaatgaattcattagccatacggtgttcataattattttcatttacttctgagctagttccatcattcataagtaattcaaatttcttacaaacattggcaggagtgtcttgatatatgcagcctttatctccttgaatattatttgctataggtgccttacaatcttttgcaccaacacaaacacatttaaattttccataatctaagattaatacacctgatgtatctattcccctctcaatgtttggataatactcaacattttctggtttgccaaacaaacctactacataatgaatattataaatatttaaatccattaatgcgccaccagagaatttaggatcaaaagcaggcaataccttcccatctttaaagctatcatatctgctagaatattgagaataattacactgaacaatctttatattccctaaagtcggaagtagctcttttatctttttatagtttgggaaatattgattagttatagcctcaaataagaataatttctttttcctagctaaatcacttaaaattaatgattccttatatgttgatgtaaatggcttttcaactataacatttttatcagcctctaatgcttttttagcaaattcaaaatgtaaattatttggcacaccaatataaattatatctaaatcactatttagtagttcatcataatcgcaaaaaaccttcttaatcccatacttatctttcaattcattcaaagtatcttcacttcttggcgttccgcaaatagcctctaattctatatcttgcaaaagatgactaattgaaagaaaatcctttactatcatcccagctccaacaattcctaatttcatattaattcctcccttttactattgatatctctttagtaaccttatcagtaaatactcaaatatgcttaactaaacttaattttctttttagtttttgcttatttactaagatatatttcctctaataattgacttaaattcttttatttgttagatatcatagttacttttaatagcattataacctataaatttaatttaatcatcccaaatcaaaccaattaataaaattcaaagttattattcttatcatcatagtattcgaagtaattcctttaacgaatgtatttcatagttaggagatattgatgattcatttactgttccctccttacaaaaccaacaagtgtcaattccagcgagatttcctcccttaatatctgatgtgatagaatctccaataattaatgtttctgcctcattgaaacctttaatatgatccttgacgtagttaaaaaattcaattgctggcttattagcacctatatcctctgatataaaacagtctttaaagtactgtgaaattccagcgccatttattcttgaatactgtgtcctcgcaattccattagtaacaatatataaagtatacttttcatgcagtttactcaaaacctcattgacatctggcattaactgcaatccttgatttaaatgcaatctataggtcttctcccactctccaccatctatactcttcccatacttagacattaacttagaaaatcttgtatttaatacttcctctactttaatcttccctagttcaatatcagcccacatgccttgattcatttttttataaacttcatacaattcttctgaatatatttcacccttatctctaattaaactcttaaacgattctccttcgtttgcgtcgaaatcaagtaatgtattatcaacatcaaataataacgtattgtatttcatttcatgcctctccctttccttttatggataacccaactaagatctgaacttatgcatataactcgccgaaatgaataacatacttttgttccagttgggatatatttcatggtataaatctaagtttaacatctcattttcaaatgcctgctgcataaaaatatttctgctttctagtactgtaacgtataaatcaaattttcaatgaggtattctatatagataaaccaattataatctataattggttcaattgaaattactcattaacgaagtgagtcgactttccttctctatttatatagcttaattatttttaatctttttattaaaatatctattgcgcccataaaaagagtattatctaggcctctactaaattcacactcatcttactaatttcaaatataaaaataatgccaaaaaatatcgcaagattattcttgtttgtttacatatatggtaatataatacatttaaatgcaaatacattgcaacaaggagatttatatgaaaacaagaatagaaataatactagggttcttacagtctggaaaaactaattttataaattccatgattaaaaattgcgatttacaaaatgaaactattgttgttatccaagatgaatttggacaaagcaaaataaaaaatgaatttgttaattcaaatgataatatgaatattataaacatcgaaaatacttctaatgaagaaattaatgaaaagtatataaacaaaattttagaaatgtattctccccatagaatatttattgaagttaatggtatgaaaaattctaactctataatcaatatgttcaataataaaaatttaagaaaattatgtgggattgatgatatcgtaaccttaattgatacgaaaaagttcttcatttatttcagaaatatgaaaagcatgctaagtactcaaatttataatagcaagacaataatattaaacaatataaataatatcaacaaaaaagacttcttaaatattcagaatcaaataaaaagaattaatgaaactgctaacttattagagcatgcgccttcactaaatattaaagaaatacatcaagacgaatatagagaaattagtagtcatagtttttctgcaattaaaactatgttttatatgagccttctaatattatcatttacgtgttttgctgcattatctattactgatagtaatgggtattcattctatttggacaagtttaaaaatttttatactgtattcattagcatattaattcaaggtatcccatttatcttagttggaagttttgtatctgcaataatacaaatttgtattccaaaggatacatttattaaattttttccaagaaatatattcttgtcatgtgttattgcagctcttgctggtttactcttcccgatatgtgattgtggaactattcctgttgttaagggacttataaagaaaaaagttcctatagctgctagtattactttcatgttatctgccccaatagtaaatccaatagctataatttcaacagtatatgcctttcaaggtatgaaggcggttgtaatttatagagttgttgtaggcataataatctctattttagttggtttaattatgcattttataactaggaaagatgatgatatattaagtattgataatgatggattaagttgtgagtgcggtttttgtaatgatgactatgattattcaaaaaataaatttgaaaaaatcagagcagtttttattcatactggcgatgaattttttaatataggaaagtttatgatcattggtacatttttatctagcatttttcaaaatatagtatctgccggtaccaacattccaatcttgagtggtaatataagccctctaattgcaatgatattattgtcttttgtactttcagtttgttcaacctcagatgcattcattgctaagggatttttaaaacaattctcagttaactctgtaatgggctttctagttgttggtcctatgcttgatataaaaaatacaattatgatttttggaaactttaaaagaaaatttgccataaaactaatattctttattgttgtagtatcatttagtattcttattaaccttagactatagatatccaaatttgaaattatatctattggttgcaaaaccgaaattagatacaaatttgttccagcggactaatgaaattttcgctggatagttctaagtggaaggttgaacccatttctgcatgctccaaaagcaagtttatgacaagcagaaaatggaacaatcttcaactaagaaccatcacaactcaatttcaaatgccgctttcacaaacatgtatctaatttccagtataattcacaaagattaaagtataggtatatattggggtttggatatctatatgtaaccaccaatgaatttataattctatatattatattaattcagcaacgagaagaattttagtaataatagcatatattcaatagaaagtgtgtacagatcattgacttagattcaatatattaataaaagatgtgtccaaattattggtctaagtccaagaatataagaatataagaatatcaacttatcttaggcaatatattttatcttaagatactctttaatttgatatggagatgaaagtatgaaaaactttaatgtggaagtagttgcaaaaatattaatactattaggattttcaatattctatttaaaaattattgtaagtaatgaaattctcacatatgtacatccaagaattataccctttgcaatctttggaatgatttcaatgttcataattaccttatttctaatttcagatgtcttctataataatagaaaaaaatttaaaattaagaatcattttatttttatttttcctttgattatgatactttttatgcaaagtagtagcgcaaattctgccactaaaagcattgatgcaaatggaaagcttaacgaatcatcatctactaacaactcttccaataattcaaataacagcttaccttcccttaactcaacatatgaattgtatagtggaaaatccgaaagtgatgggcaaggtcaagtagataaaattcagctaaatattgtgaataatattatagaagtaaacattaataactttgtatcttctcttgatgagattttaggaaaccctaaaaaatatgaaggaaaggaaatagaaatttcaggatttgtatatagagataaagatttaaaagaaaatcaatttataattgcacgatttatgatggtgtgttgtgctgctgatcttcaagttgcaggaattgaatgttctagcagtgattcaagttcatatgataatggtacgtgggtaaaaataaaaggcaaaattaagattaatacttctgaagatggaatagatccagttatatctgttgaaactatatcaaaagatcctactcctgacacttcttatgtttatccattttaaaatatatgctaatataagtttcaatcaacataatttctatgtaaaaaaattataatgaatataaaataagaataatctaacgtagaaagttaggttattcttattttatagttctaaaacattgatgtcacatttccagtaaatttatctacataataccatccgccagttgttacatattctcctgttgtatcatagcaatgaattacgtaagaattagattcatcatgatcatattcaactttacttggaacatatttcccattcgctagaagataatctttcactttctctacagcttcaattgttgaaatctgagtattagtgttatttatagtaatatttgaattaagcagtgttgtaattccttgttttattttatacacattgccattagaagaatcatagtaatattcactaatattgtttcctacttgatcttctgcagaaaatttatataaactcttatcacttaatcctatttcattaataaatcccttattctcatatttaatagttccagagccattataaatattaattatatcatacataacctgaatatcatttggaacaacagtagtagtcttagattcttcccaagctccactatcatttagataataccatttattattatcattaatccagcctgtttccattattccattactatcaaaataataccagctgccatcaattttatcccatccaactgagtaagcttctcctttagtaaattgccatccttgactgctttgtttccaatatgcattagccatagtagaattagtaatttgtattgacaagatagttaagattactaaggacaactttttcactttattcattgccattcctccctacacatattactattacaccttttaccatgtgatgtcaataatgctaatagaatataataactcttaaaaaaggaaaatacacagatatctgtttcacatattatattttcttaccgcttttaaaacttctactcagatttagctttatagataatccaactaagacctgaacttattcatataactcaccgaaatgaataacatacttttgttccagtttctagttggggtatatttcatagtatagatctaacttataattggcttatctatagataaacaatttaataatttcatttatactttgcaataaataccatactagaaagcagaaacatttttataacctcaagggtcataatatgcaacaggcattgaaaatgagctgttaaaagcccttaagtagtgaacccgaatctttgattcggtgtgaatcacttactcagcgaacttgtgtgagtcgagtttcctctaaaggttgtcccactaatgcttgtcacaataaaatttggaacaagcattagtggtgaagcctgcaatttagtgctttcagcgaaattttcatagtcctgtgaaataacaatgtttctcctttcggtggattattacataagtctaagttatatattgtttatctacaatttccagagaaaaaagcaaagcactaagaatcttcttagtgctttacttttatttattatagtccttgttcatagctttctatcattctttttaccatttctccaccaacgctaccgttttgtcttgaagaaaggtttcctttatccatgctttcataattgcttaatccaacttctgaagcaacctctgtttttaatctgtttaacccttgttttgcctctggtactaatgttctgtttcttccactattgtttgaagccatatgaatctacctcccttaatttttttttattttgtttggcagtaatatcttaaccactatcacaaaatataatctataaaaatgttaacagaagtagtacagatagcttgtattagttaattttagatattcatccttaaactataatctcatatttatttttaataagtgctttcatagcattatccacatctttttccttaacaaggatataatcagtatcataagtggaaattgcaaatatgcttataccacttttcgctaaaatcgtactgattgatgaaagaattcctactaatgaaaagtccagctgaccttcaacctttagaattctccattctttttcgcatttaacttcatcaggtatatctttttcaaggcatactattgataattcatcacatgtctttgttatagaaaaaaaatcactgttttttatccattcaggaattgattcgttgttatttaatctgcacactccatatttttcttctaataatctgatagttaatattttttccgacatatctttctttcatcctttcttctcatttttaaacgccttatttatcgcaaatttatagtttaaaatatacaaaaaaaaagccaatagaaatattattaaaatacttctcaggcttttatcctttagtgaatacaattaactttaaagtttatcttagaaccgctaatcatgttgaactattgaatcaaaaaaacaattcagccttaattattacatgttaaatttattcatctattctaacataatgtagaatttcaatcaacgtcacatattattgtatatatttcgattacgatttttcatttataatttcactaaattaggtgtttatttattcctaaaatgtgtagaatacattgcaatctgaatactttcttactcaaaaaatatattaactttacctctctttagccccccataattccaatatgatagttaattattaggtaatgctgaaattggaaatgcatgtttctttattttatatgcaagatctagtttagtatcatcatctatttgactcaatttatagttccatactcttgtattttcatcaacatcttcttctgcattgcaacctataacattccctggtacttcaacttcattaataaattctatatttttaatataactgtatactttttgatcatcagtattattttttattaagttatctattgctgatttattgaattttacatcaattgtgtatacatcatcttttccctttgttctttttaaatcagtcattgttgctaatccacttgaatttattttttcctctaattctttaatatctttgaactcatatgtgatttcttcaatattcatattatctttaaaatacttattaaaattatatccattttctttagcccattcatgatcaattacatcattttttaattttgttgatataaaatcatcatatacaacttgcaattttacaatacctgacccattttcatttattacagtagaacttcttaaatctatatctctacatccaagtaacataatacctaagattaatataagtgaattaaaaattgttcttttcattttactcattagttctcctcctagatgcatatttttctatactactatagtacccaaagatagattgtatatgcataactacattaagcttaccctaagtttcatacaaacttaggccatccccctgcctctttattttagggcattctaactaatttcaggctcaaatttctactcacttttaacataaaaatattatccaaattaaattacttttaaaaataataaagggtagttaacgaactaaaatcgcaaactaccctttatagactattttgtatgtaggaacttttcataactctctattttatcctctctgttggtattctttatccaattattatattccaagataactttttctattgttgttacgtttaatttattatttctttttcttttcatttctgcatacatattaattttaattatatttcccatttcattgccctcctttctatataatataactttgatattaattttgtgtgtataaaaatattaagaaatagttaaaatttaattatatcttctaacgtagataattttaaaaacgctctttgtatagatacaacaactacagcctatacttatgcgtatacctcaccgaaatgaataatatacttttgttccagtttctaggtaattctaatgggtgattctaaggctataaagttgcacccaaagtgctagcctcaaagaacaagcgctcacagagaaagttcgaagaacgaaatataaaatgctcatagagaaagttctgcttaccaaatgtaaaatttggagcatcacttttcgattctcactttttgaactagcacatttggaatagttcaaaggaaactcgactcacttcgttcactgagtaatttcaattgaccaaatcatagatttggaatttcaattaagaatcacatccatcagaattaccaatgaaacattccacaaaagtatattactcatttctagttaagatatatttaatagtataaatctaacttatagttgaattatctatactcacagcttatattttgttactaatcaagatattatcttttatttacaaattataaatcaagctgttggttggtttatctatccctccctatgctcaaaatcccattattgtaactgttcaagctagcttaactttgtagcatgtccattctcatcaaagcgatatccgtatatatctatattggtaattaactcgccagtagaataagttagataatcgtatccacctacattaaaccatccagtaaccatggctccatctgttccaaagtagtaccagttaccatttattttctgccatcctgtcttcattgatccatctctagagtctccaaggtaataccacttattatttttcaataaccatcctgatttcattgacccatcatctgaattccctaggtaataccaataatctccactcaacttccaatcataaagcatccagccttcactatcaaatagataccactttccatttattttttcccatccatttttagtataacttccatcagtgtgcctataccaccacttattatcctttataatccattgtcctggtttagtaacattgcttattaaagctccatcagtaaatgaatttatgtcacaatcttcacttaccccgtttactctgccagtttcagtatattgatgccctaccctattggtaaagaaatttgatggcaaattccaaggatcattgttatagttagcctcccagaaaggcatatcctgtataactgattttgcattagtaaggtaacttataaaacttgtataactgtaaatgcctaatggaatagacgttagctggccaaatgcagtaacaaatcttgtaacataatctgcaagtccgctaaagttagtttctacatccatcataggcactagatcccaattataatcttttatcttattataaaaattctgggcttgtacttctggagtacttgtcccaactaaaaaatgatatgctcccacttttaagttattatttttgcatccactataaaatagttccattttgctatctctaaatgttgccccttctgttgcctttaaataaacatattgaaccccatctcctgcaacggctccaaaatctatatttccattgttatttgatacatctataccttttatataccccataattcatactccctttcgattttcatatttataaagagtaaccctaaagggttactctcaaatattcagttgctattgttccattaacttattgcttttatttattttctttagaatctgaagcttggacagtttttgcttcatcatttgtagtttgatcgcttaatcctggtgtactagtatcaactataattcctagcattgttaagattgttaaaatagtattaacaatttctgtatagttattaggaattatatttaaccctaactgttgcactaataatgctatagcactagctattgcaacccaaaaggctttgttttttaatcttgcttgaagatcaatacctaacatacctatcttcacctctcttcttttatatatacataatatgaattaaaactcttaatggcgacttaaaattgaactaacagtacgaattctattttataagtggtactatcattcatcactttaatacctcttaaaatatatatgttttgaaatatattatgaatgccatttttacaatccatctaagttttaatctaagtaataccttaaatttatattaaagttatttatttaaagaagaggcaatgtaatataaatctcaaataaaaatagagataatattttactaagcacagaaatactatccctactttcagccaaactaattttattgtgatttattttataatatacactcaatgctagttatctttgcatctcccgtaagcggcttataaatcatcactttcgaaataccttgtccattatgcgctgcaacctttgacttacatataaaacaataatttgttccatttacgctctgagtagctaagattttaggttcatactcaacaccaattaattcacttaatgctgtcttaagcacatttatatcatcatctgttatgttattgtgaactttccatcctcttgatatcttcatagaattctcctctcatttatatccccttaaattttagaaaacgattatataacattcgatttactatagcatattcatattatctgaattttttaactaatttccaaaagaaaatttagaagtgcagcaaatttgctttaaaaaataaaatatagaaaatcaattgtaatatgcattggtgattatagatatccgacttcaaatctagatttatgtggtgatagaactaaataataaaaagaagtgttccaaatatatgaaacacttctctttaactattctatttaattaataataaactctctaacgctgtaaatttacttttctcataacatctttcatagtttgagctccatatttattaataagatctttaactattgctctatgaaattcctttatagttttttccttcaattcattatcacaaatagaattgtaatcaacttgattattcatatttttctctccttttgacttatattcataatgtgcataataaataatattttatacatactttatttaaaaatatttcatatacactatgaaatgcgctttgaagttaaaagaagagctttaatagctattgtctataagaatctcttttctaaaatataaactgctttctataaatcttttccattagtagaaataacctctttgtaccagaaaaagctctttttcttactacgctttaatgtacctttgccttcattatctttatcaacgtaaataaaaccatatctttttttcatttctcctgtggatgcgcttacaagatctatacatccccatggagtatatccaataagattaaccccatcaatattaatcgcatctctcatagctttgatatgttcccttaaataatcaatgcgataattatcttccacatatccattttcatctggagtatcaacagctcctaatccattttcaactacaaataatggcttttggtagcgatcatacaaagaatttaaagtaattctaagtccaagaggatcaatctgccacccccattcacttgcttttaagtatggattttttagcgtagcaaatacattcccttctgtttgtgcatttatttctggatcagcactagtcaatcttgatgcataatagctgaaagaaataaaatcaacagtattattttttaataattttttatcctcagcttccatttctaaagtaatattcattctttcaaacatcttctttgcatagtttgggtattccccacgagactgaacatcaataaagaaatagttttccctatccttctccatagctctccatacatcttctggattgcaagtatttgcataggtattaccagctgcaagcatacaaccaattttaaaatctggatttatcttgtgtgctatttgagttgccttagcacttgcaactaattgatgatgtgctgcttgatactttatagcttcttcattttctccttcttcaaaaactaatcctgcaccaatgaaaggcagatgtagcagcatatttatttcattaaaagtaagccaatacttcactttgtctttataacgttcaaaaatcacttcacataatctttcataataatctatcattttgcgacttctccatgaaccaattgtctctacaagatgcattggtacatcaaagtgagttatagtaactaaaggctctataccatatttatggcactcatcaaaaacattatcataaaattttaatccttcctcatttggcattttatcatctccatttggaaatattcgtgcccaagataaagatagacggaaagtcttaaaacccatttcagcaaataatgctatatcttctttatagttatgataaaaatctattgcttcatgacttggataatagtgttcttcatcgcatttcatcattttcatctttccaagcatcactggaaatctgtctttacctgctggaattacatcaactgtagataaacctttattaccttctaagtatccaccttcacactgattcgctgctgtagctcctccccataaaaattcttctggaaatccctttatttctgagtcatcattcatcttattgtatcctccatatgtttaaaaatattataaaaataaaacttcttttcgttgtgacaataactatactagttttgagatacagttattgtctgagataccgtaataggtttcatgcttgctttagatttagtttctttatttaattgctggtcagagagccattccataagcgttgttacttttccatttattattgctgaacattggttattatatacgtatatccatgaccaatgacccatatattcatatggtgttccatctgctttcttatatagacctgtagtatcaattacattatcaaaaaatgaaaaatgaacatttgtatcaccggcttgcactaaacgattataagttggaactacataatcagctggaggtactgttgcatctgttttagatgctgtaaaccaaattggcactttcttaaacgcttcaatatctttatcagtaatcaatgtatcctttagcgcctcacaagttgggaacgctgctgcaaaataatcagtataatcacgtatcataagcattgtcatatagccaccattagagtctccacctatataaattctatttgtgtcaatattactattctttgagacataatctttgattaatgacataagagctttttcatactttgagcttccatctccaaaaccagtaaatccatccatccaaaaagttggtgcctgaggcgctaaaatatatgcaccattaaaatatgcttgcatgtcttttgatgcaaaatttacagctttattccctgatataggtaaaagcccatctgttccaccttctccaataccgtgtagccaaataattaatggttttttactataatcattttctggtgtatagcttgtatattttagagtaacgttatcataagttgcacttccaattttaaaatcatcaacaagctttttagttccacccgcaaatttatttataactaagccagaaattctacctgaatccgtaacgatatcattcttctgcttaattgtaaaatcacaattaacccaaccattaagattagtagttaaattatagttaatcggcgaagttaaagatacatcaggtccaacttccaaatcaaaagtaatataattccctttgctttgaatacttccaatatcatcagaaacatatgcatttttaatcctacaatttccttccgcttctcctaatataggtgaatttgctctattctcagtccttaatacatgcacttcgaatgtatccttagtaattgctgattgtggtattgtttcacctaaatcaacaattatttttgtgattgcagggccccaatcaaatacctctgtagtagtacgataagatggttcctgagtcttattattgtcagctgcaaaagcaccaacacgaggtgtacttatcatagttactgccataatgactgacataatcatttttccacgcttactaattatttttttcatttaactcccccctgatttatcatattttaatatactgggcattacatttattatagactaatccccagtatattttaaattattctccaatatcttatatcattactgttagtagctcttctttataatcaataatctttctatcagtttcaataacatctaaataactatctgaattagtaattactactggcgttattaaagaataaccttctttctctatagaatcaatatcaaactctagtagcacctgtcctgcttttactgtatctccttgtttcgctttagggtaaaagtattttccttccagctgtacagtatccatgcccacatgaattaatatttctgcaccgttagcacttgtgatccctattgcatgacctgttgggaaaaatgttgtcaaaactccatctacaggagcaagtattttaccttcctttggttctattgcaatgccttttccgagtgcaccttttgaaaacgcttcatcttttacttctgataaaggtttaacttcaccttttaatggactcactaagatttcttgtctaactaaaggttgtactgtttttaaatcgttcttacttttacctgaatccgtattatcttcaagttttgtaaataacattaatataaatccaattaagaaacctgctatcatagcaattattgaaccatagaatcccctatccattccatttggaccaatataacctggtattccaaaaataccaagacctcctatcatatatacattagaacccataaatcctaatattgcaccacccagtgaacctcctatacaactcaaaataaatggcttcttacgtggtaatgtaataccataaatagctggttctgtaacaccaaaaattcctgaaataaatgctggtatacataatccttttaatttactattctttgttttaagcagaatagctccaactacacctgtctgagcaaatgaagctgcaaatataagtccgagaattggatcttgatgtaatactgttaaattatttattgctataggaataaatccccaatgtaatccaaagataacaaatacttgccagaaagcccccataaataaacctgcaacaactggacttaagctataaattgatagtgttaacgcaccaagtaatttacctgcccaagttgcaataggcccgataactataaatgttaaaggaacaataactaataatgtgcaaaatggaaccaagaatgttttaactacatcaggaattacctttttaaatccattttcaattttaccccctacatatgtagctaaaataattggtataacacttgatgtataactcatcaatataactggaattcctaaaaaagttatataaactggtgattcaattattgaaccggcaaataaagtatataaaggctgagctggtggtgctgtcaatcctgctaatgatgggtaaactaacgctgcacctattgccataccaataaatttattcactttaaacttattagctgctgtatagcctaagaaaattggaaagaagttaaataaacaatctccagttgcatttaaaatttgataagttccatcagtagtattaagtatatgcaacgctatgaataatgcattaaatcctttaatcatacctgttgcagctagtactcctaaaatcggagtaaatacacctgatacagtatctatgaatctgttaaatggactcattttttcttctgacacatcttctgatgctccagttttaaagccaccaatggcaacaacatctgcaaaaacatctggaacatgattgccaataaccacttgatattgtcctccgctctttacaacagtaacgactccatccatattttttaatacctcagtatttgctttactttcgtctttcagcttaaaacgtaatcgagtaatacagtgagttaagctattaacgttttctttaccaccaacattctttataatgtcttttgctaattgttcatatttcataataattctccttttcatatatctttataacaaaatcgcaagcgactttggagctgaagatttttttacgcatctgccttttcgaatacatgtgagaaaaatttggcaggcggataagatttcttttttattctttttaaaatacctaaaccatccaagcaaccttttttaagttataccctcaaggagtgcctcgtccacagattttactggaatataaattcctaaagaataaaaaaacgagaccagatatggatagatatatcttttctatccatatttggtctcgcctgctttaccagtaacaatccaatacttttatattattttaatttatctttgagtcacacgttggatatgtatagttaaatacagttgctcttcatcagataattctttttctaaatacttctgtattttcaacatacactcatatgcttttttatatttggttttaacctgctttaataaaaaatcatcctcttccttttccatcttttcgtttttacttaatcgttgaaaaaagaatcttaaatgtgtaacaaacctctcataattaagagatttttcgttaagtgcaatgttgtaagtgtacttaattatattcaatatatcctgtatcatttttgtttgatgagcaatatcctccactttattacccgaattattagtctgtgcatttattaaatgaagagctatatttcctgcttcatcttctggtaattttttattagtctcactctggatgaggtctaatgcttttaatccaatttcaaattctttaggataaaactttttaatctcccagattaatgcatttggacgatttaatccttcatcaaataattttaatgcataactaatatgatcagttaaagtaatatatatataatcatttagttcaacgcttagcatattcttggcgtattcaataatatcataacatagtgatacatgttcagtaggaatatcttctaataataatttaaatttctctgaggcatctttttgttttagtataaaagttttttcgattagattttcatctacttgatctcctacacttttcttaaagccaactccacgccccataataacaatctcttgcttacttaagtcttttgctaaaatagcattattattaaatatcttttttattatcattcctatcccccagtcaaagtttatgataaattagaatataaaaaccccaattaatcaaaagagactaagtaatatctcttctcattaattaaggtttcgcctgatctagtcagtaacaatcctaatattttgtaatcgtttatccatgttcttataataacttctttactattaaatgtcaagaattttgttattattttcatcagaaaatttataatcaactgttaagcttaagattttttagaatctatctttctaagtgcacgtaaaaaatctgcacatccgaaatggcagctatgctgcatataagaacattttatgcaagcgaatatattttcttttttattctatctcaaagcataggcttttgaatcagttcttcatgatttatattcataagtggcacactatccacaaatttagcatgaatataaattcttagagaacaaaaaagccagtagaacatttaatcttaaatgttctaccagccttacttaaccgcaaattgagatttacagttttttaaagaaaactttttctacgttcttagttcttaattactttaaaccttgttcgtagctttcaatcatgtgtttaaccatgtatccgccaacgcttccgttttgtcttgaagaaaggtttcctttatcttgattttcatagtcttgtaatccaatttctgaagcaacctcagtttttaatctgtttaacccttgttttgcttctggtattaatgttctgtttcttccactattgtttgaagacatatatatctacctcccttaaattaatataaattttgcttggcagtaatatattaaccattatgatgaattataacctataaaaatattaacaaaagtagcatcataaattataattagaaaaaactttcaatatcttgtactaaaatacatgaaaaaagtagcaatctacgatcactactttttcatgtatatatattgcaaaaataatacttcatcataattttagctgtaattgtgaattgtgaaatgtgcattgtgaattgcaacatatatattataaattatacagccttgtctgaattttcttgattgctttcattttgaagtgcactatgctttcttccgtaaacaaaatacactattaaacctatagcaagccatactaaaaatccaatccaagttattaattttaatccgcataataaaattatacagcatattattgatattaatggagtaaatggtactcctggagttttaaagattcttttgaaatctggcatagtttttctaagcactataactgcaagagatacagaaatgaaacttaataatgttcctgtactcaaaaattctacgataatatctaatggtaaaaatcctgctattattgctgctatagttccagttattatagttgaaatgtgtggagttttatgtgttggatgtacttttgaaaataattttggtaaaagtccatctcttgacataaccataaatactctaacttggccataaagtacaaccatcatagtagaaaccattccaagtatagctccagttccaactaacgctgctccccagtttataccaactctagctaaagctcctggtactgcattttctgaaattatttcattataaggtaccattccagtaagcacaactgcaactgaaacataaagcaaagtaactgctattaaacaaattataagtccaagtggaatgtcttttttaggattttcagcttcttctgccgctgtagatattgcatcaaatcctataaacgagaagaatatagtagctgttgctgcaaaaatccccttaaatccaaatggtacaaaaggttgatagttagatggatttatatgtgatactccaagaactataaatacaataattatagttatctttattcctacaattaaattgttaactctagcgctttccttcataccgtaatataatatgtaagttattattgcaattattaatacagctggtaaatccactattccacctttacttggtgacgttatcaaagcttgtggaagtgttactcctactgattttaatattccaataaaggttcctgaccaacctgatgcaaccgcactacatgcaactaaatattctgcagtaaggcaccatccaattatcatagctactatttcaccaaatactatgtatgaataagaatatgtacttcccgcaactgggaacatagttgaaagttcacaataacacaatgcacaaaggccagctactatacctgctaaaataaatgaaataattacagctggtccagctaaatgtgcgcctgtccctgtggcaacaaaaatacctacccctactactgctccaataccaaaggcagctatgtcttttgctttaagatttttctttaaagctgacttttgcgcgccttctagcattttatctaacgattttttcttaaaaatattcatataggtcctcctatttacttaatccattcgtcaaaaatctcttaataactatatacctctatataacatattaaatatttatctagaaattttaaaagtacaacaaatcaattaatatattatcatatttttataatattaggcaagacattaacacattaataatttatatattttttaatttttctcttaaaaaaccaatactttttaacataatattatgcaaagtcctaatataaggaagaaaatcacaggttaacgacgaaaacccaacaaaaaattactgcattatttttaatctatgtttctaaataaatttaaacctataatatccatcattattttaaacaaatataagaataatattagtaataaatgaagaaatttattaaaaaatgccgaacttatatctcttatcattactttaaaacgataagaagcataagttcggcactttataataagattattgtaaaattttattgagctataagataagccatcaattcttctcttgtaaatcttttaggttctttaaattgatttaaagttaacgctctataataaacttcagctactttttcaacatatcttcctttagataatacatcttctatatctttactaacaacaattactccgttactttctaataaacaagcatcacttgtgctcaatctttctactaagtcttttgctggatcattagtttttgctttttcataattagctaaatatatataacctccgtagtttgccgcatcataagttactggaggaattactttattagctaccgcaaaagtagtcgcataaactgggtgaatatgcataaaagcttttatatcttttcgagccttatatatatcaagatgcatttgcatatcactatttggctcaattccatccattgtttcaactttatttccatttaaatctacaacacaaacatgttctttacataaatcctctattttaatttttgatggtgttataattacataaccagaactttcgtctttaatactaaaacttcctattttttctatgcataagttatatttttctgcgtctttagcaatttttataagtttgatttttaagttttctaacatacttacactctccttcaccataacactcacttaatttaatcccattactttatcttcaaatattctagcatccattaatttaagatctttatctactattggtgcaaaatccattgcagctaatatatctttttcaagatttactccaggtgcaatttcagttaaatgtaatccatcttcttttaactcaaatacagctctttctgttatatacataacaggttgttttaacttcgttgcacgatttccactaaaagtaatctgctgaacagagtctacaaattttttatttgatccatcatttataatttttaatttcccatcttctatttttatgtctaatcctttagctgtaaaagttccacagaagactactttcttcgaactttgagtaatgttaataaatccaccacagcctggcacctttggtccaaatttacttacatttatatttccctgcttgtctacttctgcaagacctaagaatgctatatccaatccgcctccatcgtagaaatcaaattgtgttggttgatcatacatacattctgggtttattgatgctccaaatttattaccgccttgaggaattccccctatagctcctggttctacagttaacgtaaagtaatcacatattccttcttcattagcaacatttgaaattgcttctggcattccaatcccgatattcacaacttgtccttttactaattccattgcagctcttcttccgataatttttctttcatctaattttaaaggtgctaatccatcgaccaccatatttgcctctccagttaatgaagggtcataattgtatcctaatatttgagcttgatcttctttatcttctgcttcaactatatagtcaacatatattctaggtatcttcacagctcttggatccaatgttccaaatttaacaatcttctcaacctgaactactacagttcctccgcaatttttaactgcttgagctatacatgcagcctcagaataagtagcttcatgatccattgtaatatttcctttttcatctgcatatgttcctctaataaaagcaatatctatctttggacatttatatattaaattttcttcacctaatatatctattacttgtactatatcatccttagttattgaatttgcttttcctccctctactctaggatctacaaaagtgtttaatccaactttagttatagtgccagtcctattacttgctttatctctaaacatatgacacataactccttgcggtaaattatatgcatatgttttattatctctaattaatgcgcctatcttaggtgctaagccaaaatgtcctcctataactctacctgttagcccttcatgtgctaagtgatttaatcctttacttcctctatcacctgatgctgctgcaaacattaatgttagatttttggggctattttcttctaaaaatctttcttccaatcttttgattaatgattctggaactcctagtaatgcgaaacctgatgttgctaaaacattgttgtcttttaccaaatctgctgcttccttagaattaattatttttaccataaatatcatctcctgaaaaatataatagcctttgttatttttttatcaattcctcttacctttattttaatagcttgtctattttttgtcaatctaattttctgacaattcagaattattttttaatccattattattcaaaaatctattttttattgttaatgtattgatatcgctaacatttctatatttctcccacatttttcaagaaaatttaaaatataaaattaaatcaaaatatttattatctgattatacttacattttatgaaagcaatcacatattggttaatatatattgatatttttttaactatttttcaatttattattgattaccaaataacaacattatatttcacatatcgctttaacatatatgttgcaattcaaaatgcacaattcacaatgcacaattacgtctaaaattcttgcaatatatgttctccaataaaaccatttaacatttaaattttccctctttaatacagcaataactcctttgattgtcttaaaatcaaaggagttactactatattataaaatataaaacttatattgttttctcttttgttatattatgacttataatcagcaatatatgttatatattaagttgctctattattcatattttctctatatggctctaaatgaacaattacatcggcattattattaaattcctttcttaacgcatcttgaatttcatgagttaatttatgcgactcttcaagactcattcttgaatctgctaaaacatgcatatctatatgcatatcttcaatagttccacgacttcttattttatgaacaccttttacacttttctgggacattgtaatttcttttattgtcccagcttctactgcaatactatcaactaaaatatcgctagcagctctgaatatttcataggcagaatgaaatataaagatagcaactacaacagaagcaaaactatctataagtggcgatactcccaattttattgcgctaatagctataattacaccgatggttacaaatacatcactttttgtatgcattgaatcagaaattagaattgtactctttaactctaatcccctcttatattcatactttgtaataaatatattaatgcataatgtaacaagcattacaatcagactgatcgttgtaatttctggtctaactggatgcataaatttattaatcccatcgattataatctttccacctataaaaactaacattccaacaataaataatcctgtaagtgtttcatatttcttatgcccataaggatgctcttcgtcaataggcttggctgctattcctaccccaataagtccaataatattagatgatccatctgttattgaatgaaatccatctgccactatacttgaactatttgcaaaagtaccaattactatttttataaaagctattattatatttgcaaacataataatccaaagcactctttttatttctttaaaattgtttttctccaaaattacacctacttttaattaataaaatttaagtaactataataaattggttgatgaattcaactatagatgactaatatattattattttttctttatgttacttctaaaaaagtttattctacatcctgcttcatcaattattttaataatagtttgctcattaattatcaattggtaatatattttatacttctatagtatgttattgttctatatatgttaatatatctagaaatatatcaagtacttattattatcagttgaaaataaattctaattgatatctcatatagtccatgatctattagttcaaatattatataaaaagaaatataaacaacaaaaaggactcagaagcccattttccgaatcctccattttaaattaatatattgcaaaaataatccttcatcataattctaaaaaatattacaagaattttaactgcaattgtgaaatgtgcattgtgaatttcaacatatataactattatcgaaatccttatttccagtatatctaatatattccattaatgccaacttgcacaaaaatataagattactttaaaaagctattgcaaatagtatattggtattaattgaaaaaagcattttgttaagcattctatagaattatatttatataattagctatatcttttatactttgtgtggtaattcacttctaattttttctaggtgctttggataatcctgaattacaatatcagcttttattccaatctgctctaatgcccccaatgaagattgtactttatcccagaattcttctactgctctattgacatgatttttcaccactgcagtctcaaactcattattttccttttcaacttttctcaactgattcattaaagttatttcattagaatctatattttttaattctacacataatgtattttttaacccaagtatacaaaactcttcacttaatccatcttcgcctttattagaaacatatgaaatttctttaacaatttttcttccagtatatccgctcgagtcttcacattcttgaaatacaagaatgtctctaacactaaaatccctattgtattttactaattcaaaagttttacttccatctcttatcactttatagttattaggcgttatttttagctcatgtatcatttaaatcatcttctttctatagtgtattatatttttaaattttagacttaaataaattgagtatttgctccatataactattgtttcaaaaaatacttctactattcttaataaaagtttttaaattatgtaatctccaattagtatataaataatccaccgaaagtagaaacattgttatttcgcaggactatgaaaatttcgctgaaagtactaaattgcaggttccaccactaatgcttgctcccattttcattgtgacaagcattagtggaacaacctacaattaagagcttttaacagcttattttcaatgcctgctgcataaaaacgtttctgctttctagcatagtatttatttgaaagtataaatcatagctatgtataagttatagataaacattttaagaatttaggcttattagatgaacatatttgcaaagttgctaaaactttaatttaatatcttcactagaaatcataaatatatttgtgaagaaaacatttgaaaatgagctgttaaaggttctttgctgtaggttgttccattttagcttgtcaaactgaaagttggagcatgctaaagtggatacaacctgcggcttagaaccttcagcgatattttcatagcttttcggaatcaaaatatttatgatttggtaagtagactagggaatcacttccctaacccctctcagaaccgtacgtgcggatttcccgcatacggctccccacattataattcacagtatatatgatatatcttcttttaagttgaaaatattaacatatattttagctttaggtattttgaagcactcaaacatagtgtcaaaacttctccagttataacttcttttctgacttcttttgtttagccatttaaaagttagttttcttactaaatatctgaaagttgcgagacttaaactgttgtcagtgattccgtaatacctataatatcctattagtctctgtgtcagtttctccattaataatgtgagcggcactgttctattattctttaaccattcattcaatctctttatgctagctccaaatttctttgagctagtcttcctcttaactctaaaacttccattctttctgcaactgcagaagtgtgtaaatcctagaaaatcaaaagttctatctttatatgattctaactttcatgctctcttgaattttctatcatagtaggcattcttaccgaaatataatattttagttttatcttcagctacctgcaagttaaatttgtctaatctgtttttcaatgcttcatagaaagctttcgcttcgtcttcatactgaaaacagcaaacaaaatcatccgcatagcgtactatgtacgcctgtcctttacacttctttttgataaagttattaaaccatatatctaaaacataatgtaaataaatgtttgctaatgttggagatattattcccccttgtggagttccttcatatactttataaaactttccgttttccattattccagttttcaaaaatctacctatatatctaagtaagttcttgtctgcaatcctgtgttcaagaaatttcatcaaccacttgtggtcaacattatcaaagaatcctttaatatcagcatctacaacataattcacattcttttcagataaatatacatttaagattttaagagcatcatgacaacttctattttgtctaaacccaaaagaactatcaatgaaatcttgttcatatattgattttaatattttattaatggctaattgtacaactttgtcttcatatgccggtatacctagaggtcttttcttgtttgaaccagacttatctatgtatactctccttacaggctgcggtctatatttaaaagtcttcattctaattagtagattatcaatattattctctaagttagtttcatattcttcctttgttaccttatccactcctgtagccttatttccgctcagttcataatggcataaaattagcatttccttgttaactaaatgcattagtgatgtaaatttctctttaggattatttccagctatttctgctatcctctcaagttttgtgtacatttttttttcctcctctgtgtgagaatttctgtttctcttttcaaggtctataatatgttacacccttccctccatggtcattactcatttcttcagtactatggtgtaatccgactactcattatcatttgaatacctctgatttctaatcattgttttccatactctgaagtcagagaataatgagtcctcccaagttgacgtactatatcaatgtataccatgctacaccttaaaaccacgagaaagcacagatattcttgcaataatgattatctatgttctgacttctaatttaccgatattatcgtcctttctgactttgtgataatttcgtggctagtagtttcagcattcgcttgcggcctggtaccttgtttgtctacacttaacttattacatcgccataataagcccaagactaactaatgactggttgctggcctttgtcatgcaggattcccacctgctatatagtaataatgaggaaggttagccctcattatcttttacgcccttgcttggcgtaccggtaagttatcacataagtctagtttttatagatatgttctaattcattacttaattttttctataaattcatctattaattttcttgccaaagtaaactttttaggtatattaggaaagctttcttgtgagaaccactgcgcatcaactatctcttttccatcgacctttatttctcctgattcatactctgcaaaaaatccaagcatcaatgaattaggaaatgaccaaggagagctcttataatacttaatattctttacctttattccaacttcttcaaaaacttctcttttgactgtactctctaaatcttctccagcctctacaaatcctgcaatcaaactatacatatcatttttaaatcctccattatgtgcaagaagaatttcatctccttttattacagcaactattatagcaggacatattacaggatacattacgttattgcagttcggacaaacttttgccatttcatcaattttttcttctgttctagatccacatttcccgcaaaatttatgtgttttatcccaatttaatatttggttagctcttcctgctgctaaaaacaattcttcttctaatagcggtcctatttcatataatgatattaactcaaaattattttccaatttaatttctgaagaaacttctattgcaaagcaaaactcatcttcaatttttccgagaaggaactctttttcatatttaacacctaatttcataatttcgtcaaaaacaggaatgcttaatacttccccatttctcttcactaatagactgcctttaaatatcaaaaaacacaaatcctcaggcctactttttttcgctatattagataatatattaaaattattttccatcttaaattaattcctttcaaaacactttaccatttaaaactaatacctaatgtaaagtaataataaataatctttattataacatttaatttaaattaaggtaagcatatacatttaacctaaattaactaaaaataacttatgtatcgaataattcaataaaatttgccttattaaacatacaaagaggagcattttgtataacccctcttaataaataaactattattttatataataacccttggccttatattagtgttttttacagcagtgatgtttatgatgagatttacgacatttgaagcagcatttattctttttcatatactctataagttgacgttttgctctttcataaccatctctacagccttttttatacccttcgtactttcctttttcaaaaccttctttgaaaactttttccatcatctttgggatataatcttcatctttatcaaagtcacactcttctcttccgcctaaatcccaatcttctttttcagcaaattcacattcttctttttgatcatattcacaatcttctttttgatcatattcataatcgtctttttcttcaaattcgcattcttcttttccaaagaaatcaaactcatcctctaggtcatcaaaatcaaagtcaagctcattttcaaaataataatcgtattcttctttattatctttgtaatccatttttttctctcctttgtaatttccataaaattgtttgatttatagaagctctatttatatagcttttaatttatcaattatgctattagaaatctgataacatttttcaccagaactttgttaaaattatcaatcacttagtactatattatgctgctttataatatttgctattaattactaaagaaatattccaatatatctaagctttaacctgaataataaaactataaaagttatttaaaaaaacgtatatttttctgtactttgttaataatattattgaaaacataataacccgacctaaatttaaaatagagatagtattttagaattcactaatgctatctctattttgtattttaaatttatttataataactatctatctgtgctacagttggattcctacattgattattttaattgagtacttaacttactataattttgaatgtgagtttatcattacaacatatgtatttaatgtataaaatttttatataataatttcaaaatatatgtatatttccttactaccctgtcaataattctaaaggaaagcattattactcaaccacacttaaaatagagatagtattttttaattaataatactatctctattatattcctataaattagcttctaattctacctttccagcaattccttaaacaccttattgtgctctatgtccttgcttaaagattgaataactcttataatctgctgttcatttatcttttctttggaattcatagcaattcctattatataagcttttattattttataggtattaataagaactttaatactttctaaaaactcttctcctttattaaaaggaattaagtctttaaaaatctgatttactaagtaattctctagaatgtatgaatacccatctatctcatcaaaatatctagggttttcttctagatatgtgcgtaaatcatttttattaaaaatcccatctttgtattcattaacacattgcttaagccttatccctcttatattttcaagtaaatcatccttagcaatatcaatataaaaatcattattttccttgaaattcattccttttaacgactcataatctatgtattcattgttaaaatcatctaataacttctctattccatcaaaatcatttaatttatatgaactctgaattttccagtaaaaattcttaagaatatttaaccgttcctctatcgaatattctctcaattgaataatatttatagatatcacccttatgtcccagaaatattgaaaaagactttcagttccttcaaaagcttcactatctataattcttcttatctcaatatcattctcatttatttcttcttcgctctctatgaactccatcttatctttattcaaaaacgcttttgtacatatttcaatacaagaaggtaatccactcttttcgtaaatattatcgacaatattaaatactctaggataacttttgcaagttatacaaagattcttttccccaaatccaccatgtatatcacaaagcatattacaatttaaaaaaggacatctattaccatcttttagtgccatgaaaccattattaaaaaaatcatgttcagcttcattcaaaaagaactttccttccaataattctttaaattcaccagtactattagtgtaattgttataagtatcctcatctatatttatatcccaccctgcgcaacaagtatcaatgcaacttgagtttatgcatttaaagtcttccatatatttaggtaaaaaaatgtttattttcatttactagctccaatcttcttacgtccttaagagtaatttatcatattctaatatagacttatttatatatttcactttatttagagatataatatcaataagtttatataatattattattactatttcaatttcattatatcatacttaatctcgcaaaaatgtacatcatagatgaaatactacactgaaatatataagacgaaatttaaatcacactctattatgcataaagtgtgataatcaaacatctataatatatatattttagaagttatttaatggtaagcttcttttattggtgtttaaatctagcaatctttatctttaggaacgtttgtaggatcttcaactaaagtagtaaaataataatcatgataatgtccatctgcacaagctgttttaccctttactaaatgaatatgctttccgtctggaaggtaaatagccggacctgttgtatcacaaagatcatggtagtgatcacaaaaagtatctgtacgtccttctattttatgaacgtgtgaattaccacattctattgcaggaccagtcataccagcaatccgatgattatgtctcacacattcatcatcttttgcataatctgtacttgataaatattcatgattatgattctttattctatagctaatgtccacatagttacagttatcctcatttttatcattttggttatttttgtaaccacagctgcatctcccgttattattacaattgtatctcaccgtaagctcctcctccgttattaaaacatatataatattttatgtttgctcgcatatttgtgtgattacttagtaacataccatatttttattgctttcctatagtaaatccaccatttcaagtggatttaatttctataaaattttgtataagttagacatcccgttccttaacattgaaccattaaaatcgaaatttctatataaaaattttttttaaacaatcgcaaatagatcataatattttaattcttaaaattaaatttaaaaaaaggtagcattgtacatgacaataccacctttataaaatgaagaatcttttatcaaatcacttttataatatcacaatactttaaactagtaactatttttcataacataaattttgacaaaatatgctaaagctctttcaaagaatgcgatataaattaggtctaataaaataaagatgcagccaaataatgactgcatctaatggttaaacttgagagagagttatttaggatttgaatatattgtgtatttatataatagcatattatttttaaataatccatattaattaataacttttatttattaacattttaaaattcaaaaaaatagaggtaaattaaatcatacaatttaatttacctctaataataaatattattgagcttgtaaaaattcctcatagctctctattctatcctctctattattcttctttagccagttattataagttaaaatagtttcttctaacttgttaatttttataacttttccaatctttttctttttttcagcatatatattgattttcattaagttacccataataactctcctttcttaaatattatttattattttttatcttcaaatatatattaccatattattataaaatattcaatactatttaataataattatttattattattaaaattatattatattcacttttgatctagttcaaaaattagtaaataaaatactttagaattatatctatatataattacataggtctcataaaaattaaaataaatttattctatgccttcaatccttaataattgaggattgttattagaaactctaacatgtacctttgctatcttcattctcaaactttttattattacctttactttacatataaaataatagtcctcgacaccattagtaattactgttataggatcaaatttgaatccatttatgccatctaacgcatcatttagcattactttttcttctatagaaatttcacttctgatttccatttttctattttcttttaacatataaacaaacaccttctcctgtaattatattattaccggtttttgtcagttattaatcaattatataaagcttttcttaatataatattacaaaaaaataaagattctgctttattaaaaacaaaagagacagattaaacttaaaatctaatctacctcttagtaattatcgagctcgtaaaaattcttcataattttcgattttatcctctctgtgtgttacttttagccaatagttatattttaaaatattttcttctaaaactcttaatttaattttactcttcttattcttcttaatctctgaatacataattatcttaattatattccccatattcaccacctccttctatatctataatacaatttacatgtataaatttgggtactaaaattttaggatatgaagtattttctcatatcctataatatttcttcgatagttagtaaatttatgcttccatcatttttagttttaacatatattttggccatcttcatttacctattattcgcttttactttacatataaaataataatcgcctttataatttattatcacaaatataggaacaaatttccatccaactattccgtttaatgcttttcttaatattctcttatcctttgctgtaattgtattcctaatctctaaatcatttactagcatgccatataccctctctaataaaatacgcttatcagtctttatcatttgtcatgaattaagttaattccttacataaacatttttaataaaaaaatagttaaccacaatctcgtggctaactaaaatatctactttaatatactacttcttcaataaatatagtaagattattaactaaatcaatatattttatattatcattttccttaaatgcaactataggtcttgttggcatgtttatattttgcttaataaccatggcctctaacccattactcaactttacagtcaaaccattagggtaacaataaattgatccaacaaaatccttatatatgtcattactgaatctttgctgccccattgctgctaatacttcaattgcatggtgtggcaagatagaatcatctgactctaatatattaatatattcattacaaatagaaacaatctttgcaaactcatatatcttgtccccttttaatttttcaggataaccgcttccatcttcattttcatgatgtgagcgtatgcaagtacataatgttgccgaaaaataattattactttttaccaatttatagccttcgatagtatgatcttccccattagaaaccattttaccaatatcatgtaatatagctccaattcctagctttaaaattttgtcctgactatattttttcttataaccaattattattgataataatgcgacattcaacgaatgagtacataattcaaggtcttcatcatttttagctaagttgttatataaataggcattttctgaaatatttatattttcaattatttcttcaactatttttattactggttgttcaggaacatatttttttcttttgcattcatcaaatacattctttaactctttaattgcttttaatcttagcggggcatcatatatttcttgtaaagtaacatcatttataccatcatctatatagactgtgtttatacctattttctttatttgttcaatatttctttcattaatttttgcacctttatttaaatatatcattcctgattgcgtataaataggaaccgcaagctctttgtccattgctttttcatttagtataactaacctcatataattcttctcctctcataaacatttcatttgtttttatatttctattataaattataataaaatatattttattggtcaattttttaattttacccattataatcttaatagattattttatgctacatttgtttaatatgttaagttttattaaattatttattgacgaaattttatctagatatttttttatttttaatctaattgttgaaaatagtcgtaatacaattacgtttttttgttaatactttagataagtgaggtgtagtttatgattatattaagtctaatatttttaatttttatagtaataagtatatttttgagttctgcgaaaaataaaaatatagatgactatatgcaagacatgcaaaaacagctacaagatgagttaaaaataataaaataataataaaacttaatatcgctgttttaaattgcaaaataaaatgcagccatcatatgactgcatttttttatctattaattatgaggggtaaaggggatttgaatatcttttgtatattcatatattagcacattatcataaaataatcaatattaattgatattttttatcaattgacacttctcacaatgaaatcgagagcaatcactagtagtgcaatctgtaatttagcgctttcagcgaaattttcatagcctgtgaaataataatttttctcctttttggtagattgtttcataagactaagctattataatgtttatctatgtgaagatctttctttatgattatttctaagaaaataaatataagcagcaattggacaattcctaattgctgcttttgataaattatgaaaaaaggttcaacaatttaattattaacatctttttatttttcaaaccattcctatacaacaattttacttgtcacaaggcttttatactatctcttctatagctaataatctaggcttatttccatcttgaactttaatatatatcctcgccatagtcatttgcaaattttctattattgtttttactttacaaataaaataatactcttctattccattacttactacagctattggattaaagctccatccctttattccacttattgccttttgcaatatcttcttatccctttttgtaactttatttctaatttctaattctttatcatctctaatttctagatcctcaatttctttttccatgatataaacaccctttctaataactatattaatacttatttttgtcagtcgtttgtcaaagttattaaccttttgtaaacatcatattaccaaaaaataaattatgtagagttaataaagaatattttttatatctgctcttatataatattctcaaagaatgtaaatgttcttcttgatataggaaaatataactcttgtgtttcttctgtaatcgtcttaaattcatatccttgtgatttatagtattctattatttcgggtaatgcttcacaagtattattattcatatccgtacaatgtaaaagcagtattacttttgataatttctcgcttccctttgttgccttcctatataaactatatggagaaagctttggatttaatccatctgtattatccatattccagtcatatactttaaaattattatcatgtaatttctttaaacatctattatttaaatgcttactacttccacctggaaaccttattatatttggcgaaattccaataacattatttatctgaatacggcatgcaagcatttcttgtataaatttatcttcactacaataaattttattaaatttatgagtataagtatgaagtcctatactgttttcctcatcataaattctttttacaacctcttctcttccctcaatctggcttcctatgagaaaaaaagttcctttaacatccttttccttcaaaatgtctagaacacgatctgtaactttatagctaggaccatcatcaaaagtcagataaattactttcttcatatcatgcgaaacttttttatccagatcatgattttcactagttgtttcattagatgatatcggaatagcacttatgtttttcacgcatataaatataacaaaaagaccacttaataaaaataagaaaaattttattctattcttcaatttctcaccctccttttataatccattttagaattataattctaaacacttcttataatttgcatatttaatttttttatttgtggtaattttgaacatctactttagtgataaataataacaattcaacttatttgatgaacagatttacaaagttgctaaaacatctataggcataaaaataaactaataaatatacatttaaaacattgcatattgtattagtttattatcttatactatttatatatcttaaacttcaataaaatttataattcctttatgtaccacacatcacaagcgtaatgttcagtttcaactaaaggtttttctaatctaagaaatttattcttttcgtaaaatctcttagcggcctccatattatcaaaagtttctaaataacattttttataatgttctctcgcaaattctaaagaaagacccagcaatttctttgcgatacctgaacctcttgtttcttttaaagaatacatcttttgtaattcacatacatcttcagttcctaacaatggccctatcccacaacctgctactatcttcccgttttcttcaactacccaatatttagatttttcacagctatacacttggtaaaaacatcctaagttaggatcagaccaagcacagccaggtttattagccccaaattctatcaaacaagttcttattaatgattctacttgttcattatctttttcctgtatttctcttattatcataaagctttcccccactactaacttactagtttaatttttatataatagaatacaataaaattacttatttatcaatattaattaagaatgttccatttaatataacaattaaaataaaaatgctcctgaaactttcatgttgtctataatattttccatatcaaaagaaaaactgttcttcatcctctctatgttactcctatctataaaattctaatgcattaattattttatctgctgctttattatatttttttattctttcatagtctttttgagaaggattttcgattcttgataaattcatattgtcttttaaatcggctagctttatctcgcatgctaacctattagtaattattctttctataaactcatcgtatgtttcattatgccgtcttgttaatgcatccagtgcagatagtatttcttctgaaaagccttcattttttaaataatctattgtaatatcagtatcttctattacatcatgaagcactgcacatatcatttcttcttggcttctctttgaaatcattaatcttaaaggatgaagaatatatggtttaccacctttatccacctgaccttcatgagcttttgctgctatacatatagctttttccaacatatcttcatctccttttactagtcaaattatattttcagtaaatttaaaatattctttgtgaacttataatcgagtcaagtctatggacattgtaccttttgagaacataacctctaaaagcatcataaacaatatcagaaatatattttattctacattcaccgcaaaaaaactgctataaaattaatatccaaagcagttttttatactgtaatactccataaaagttgtattcgcctttaaattaaaatatcatttcataatatctctttacacttgcttccaattctagtaaatctaaatttcttcctactcttatgctttccttgccttctatataaagtagaaatattggtacagaaaatacattatattttgctgctaaatctaaatgcttttctgcatttacttctccactcttaatttcaggaaatttttttaaaatatcttcaatcttagttttaatgacttcacacgctccacaagctcctcctgtaaaatatatcgcgctcattcttttgtttcttattaaatctaataattccttatcattattcaaattgatcaacttaatttacctcactatattgctcttctatcatcatatttaatgtcataaccttatcttcacctaatatttgatttgcagcattatttaaatatttatcttctgttactaatataagactatcatctgaatgacatgcatataaaagtaacaagtcattctgtgataatttatttatactatttaaatatatattaccacttttagaatactttatatttaattttgatgaaaattcttcgagattactcttatttatttctataattgaaaatagcaatttacagaacctttctgatagtacttgttgacctttgtattctttcctttccttgacaacaagttcctcactcacttcttttaaaattattattttttcatcttctatgagtttattaataatcgaaggatactgtttccagagtcctattacaacattagtatccaataaatacttgttcataattatccctcccgcaattgctatattattatccttaatctatttatacatttattatactccatattattttttattaattattataatcttagttttctcatctatcgtaaattcattcttttaattatataagtttttctctcatacatctgagggctttagacataatttttattgttttatttttattgtattctccactcctacttatatgtgactcttgcaaaatagtaattttcaagttgcaaacctattagtgatatagcccccaataataaataaagtcgtgcatttatattgctacatgcacgactttatttattaaatttaaatcagtatatataatttttcacgttatcctttgttactttttcaaatggaacccatatgtgtttcccatcctgtgctaaattttctatattagataactcaccatttgatcctagttgaatagctgcctgaacagcatttttgctttggtctttcgcagactgataaacagtaaattgtaaacctccatctacaatagccttgcatccatctgatgtagcatcaattcccacaattggaattaatgaagtatctattttattttctttaaatgaatccatcactccaagtgccatttcatcattattagcaattacacagtcaaattttctacctgtagacaagaatatattaaacatctccttagcttttgccatgctccaatctgcattatcctcaaaaacataatcggcatctattcctttttccttgaaagtttcttttactgccttcgtacgccctttagtggctgcagggttcttctcaccttttaataaaaccactttaatattatttttatttttaaaataatctgcaatatattcagcttgatattgccctgacaccttttcatctgaagttactctgcaatttttaattaaataacttttatgtatttatactttctcacataatgttttaattgcatacattaataagaaggctaatccgattccaaatgaaactcctgtaattagtcttctaatattagttgatttcttaattttaaataattgtagtaaaccatcacaaatcataattaaaatcaatactccacatatctttaaactaatctttgctttgaatacaaacaaaatcactgcaattatataacccaaataaattccagtgcaccttgcacacactggaaattgaaatcccctaaaactgaaactcctttcatacatttgatgacagccactaagtgcaccaactttcataagaaatatccagaactttgttttcttatctgttacattatttaaatcttgccccacaatctgcacacaccctatacgtatttgtcttagttttagtttttcccataccgagcattccacatagcaatccaatggggcctaaacatatatatcctaagcagccttttcccgcaccaaagcctttcgtagtttcagtaatatcacttactactttgacatttaaactcccacatctaggacatccaacatttatattattcattctctgtatcccccgcaacaataaaactaccataattatactactgagaaatattacattgcaataattctccaaattctaattcattttacatattcacggtaaggcatacgtaaaattctattatcatcaaatttgtattttgtaccttcgagaggatcttttcccttaactaagttcatgcctacagaatatattgcttgagcttctgcacttgcatcttgaataactgtcccggtcataaatcctttatctactaattccatagcttctggaatagcgtcaattccaactaccaaaacatttttatttttatcacctttattatatccatatttctgaagcgctttaacagctcctatggccatagcatcattatttgcgataattgcttcaacattattgccatatcttaaaaataatgagtcaatgctcgccctagcacattcttcatcccaattacaactttgtgctgcaagttcctgggtttttattcccgcatcattaattgttgaaatagaatactttgttctatcaatagtaccaggatgatctatttttccctgaagcataatatattgaagtatatcatctttatttttatctataactcccttattagcattccatgagtcaacaattatcttaccttctagaactccagattgctctgtatcagttccaagaaaaacaatactcttgtaaggggtaataaaatttaatatatctttattaggtgttccatctaaaattaatggtatattatttttttcaattttattaattacatcacttatagtatctacctttgtatcaaccagatttattacaaacaaatcaaaatgatcattaatagcttcgtaaatactttcgttttgtataacctgatttccttttccatcaaaaaaagtgaactcaaccttgccctcattctctttctgaatctcctctaagttctttctaacctcaatattatattgatcatcttctctagattgaaacatagctacttttactggaattattgaagccccatttaaattaattgctaaacttttcgagatactacctactagcataattattattacaaatgaaattattgtaaatatatatatctttttaaatacactcatttcaagcccctcctatattggttataatcatagattgtcttttaataagagttttattctgcatatgagcgcattttatgcaggcgaatatgatttatttttttattctttatatgataattaacccaggtaaaataaactactataaaaattatacacagatttaattgcattataatttcataaagaataaaaaaatttaatgaccacaattttgtggtcattaaatttcagctttatgataattcaaaagctccagtatataattgataatacttacctttttcctttattagatcatcatgatttcctctttcaataattctaccttggtctaataccataattacatcagagtttttaattgttgaaagtctatgagcaattacaaaaactgttcttcctttcataagcttatccattccttcttgaacaattctttctgttctcgtatcgatgcttgaagttgcttcatccaaaatcaaaactggtggatcagctattgctgctctagcaattgttagtagctgcctttgaccttgtgaaagacttcctccatctcctgtaagaactgtatcataaccatttggaagatgtcttataaatgtatctgcatttgcaagttttgctgctgcaactacttcttcatctgtagcatctaatttaccatatctaatattatctgctactgttccagtgaaaagatgagcatcttgaagcactattccaagagatcttcttaagtcatcctttttaatcttattgatattgatgccatcatatcttatctttccatcttgaatatcatagaagcggttgattaaattagtaatagtagttttacctgctcctgtagcacctacaaaggctattttttgtccttgtttagcatagagctttatattatgcaaaattattttttcatcattatatccaaagtcaacatcatcaaatactacttcaccgagaagctttgtatacgtgatagttccatcttcatgaggatgtttccaagcccaaattccagtacgctctttgcactcttctaatccaccattttcattttccttagcattaattaaagtaacatatccttcatctgtttctttcttttcatcaagaagcttgaatatacgttctgctcctgcaagggccataataacaaaattgaattgttgagccatttgattaattgtttgactaaagtttcttgttaattgcaaaaatgctgcaagtccaccaagtgtaaatccaccaaatgcactaatagctagaactgatccaaagatagcaacggctacataatttatatatccaatgttacccataataggcattaagacattagcatatttatttgcattatttgcactattaaagagcatgtcatttaatctatcaaagttagcttttgcttcttcttcatggcaaaagacttttacaaccttttgcccctccatcatttcttctatatatccatttactgcgcctatatctttttgttgaagaccaaaatattttccgctctttgcaccaataattttagtaactctaaacatcaataatataattataatttcaacgcctgttaaaggaatacttaaatatatcattgaagcaaatatactaacaacagttatgatagctgataataattgtggtattccttggcttatcatttgccttaaagcatctgtatcatttgtatataaactcattaaatctccatgagcatgtgtatcgaagaactttattggtaaattctccatatgagcaaacatatcatctcttattctttttagtgatccttgagagattacaatcattatacgactatatatataagttgatataaccccaacataataaattactgccatggtaattatcattttaagaagcgggccaaaatctgattctggtttatttaagagtggtgttatataatcatcaattaaatttcttaaaaataatgttccaataacattagcaagagaacttataataatagttactaataccataaaaaacaaaaacttatattccttaagtatatacgctaataatctttttagtattttcaaagaatctttattagcttttacaggagcacgtccaccacgtcccatcattctaggagttctattgctactactatctttactcattgtcgctcgcccctttcatttgagattcgtaaacttcactatatatttcatttgattttagtaattcttcatgagttccaaatccatctattttcccatcatttaatacaacaattttatctgcatcttgaactgaagaaatacgctgagcaataataatctttgtagtatttggtattgtttctttaaatgctttcctgattaaagcatcagttttagtatctaccgcacttgttgaatcatctaaaattaatattttaggttttttaagtagcgctcttgcaatacataatctttgcttttgccctccagatacatttgttccgccttgttctataaaagtgtcatacttatttggaaggctttctataaattcatctgcttgtgcttgcttacatgcatctattaactcttcatcagaggcatctttatttccccatcttaaattctcttttattgttccagaaaataaaacattcttctgtaataccatagaaacctcatctctaagtgtttctatatcatattttcgaacatcaactcctccgacctcaacactaccatttgtagcatcatacaatcttggaataagctgaacaagagtagtttttgaacttcctgttcctcctataattccaatagtctcaccagaattaattttcaaattgatattttctaaaacaaggttgtccttatttttgttataggaaaagccaacattattaaaagttatagatccatcttttacttcataaactggattttcatcatttgccaaatcacttttttcatttaaaacttctgtaattctttcagctgatgatttagacataattaccattacaaataccatcgaaaggaacattaaactcattaatatattaagagtataagtaaataaactcatcaattctccagttgacatagtatttgaaacaatcatttttgcaccaagccaagataaaagcaaaatacatgtataaactgtaaattgcattgctggagcattaactatgattagtttttcagctcttataaaatatttgtataaagttttagaagctttataaaacttgcttgtttcatgctcttctcttacataagccttcactgctctaattccagttaaattttcttgtacactggcattcaaatcatcatactttttaaaaacttcaacaaaatatgggtgtactgtagtcataatgaaatatagtataactccaagaaaaactatagcacctataaatatcatagataattttgcattaatataaaaacacattgttgtagcggatataagcataaatggagcccttacagccattcttattatcatttggaatgcattttgaacatttgttacatctgtagtcaatcttgttacaagtccagctgtagagtatttatctatatttgaaaaggaaaaattttgtatattataatacattccctttcttaaatttctagcaaaccccgatgaagctttagctgcatgtacgccacctaaaactccaaaagtaagagataaaaatgatgttattatcattgccccaccaacaatacttacatatttcacattaccttttcccaccccattatcaataatccatgccattaaaagcggaataattgtttccataactacttctaatgcaacatataatggggttagaatactatctcttttaaattctgctacaaaacctgctaatctttttatcataattttcctccttctttgttaggtttctaactaatagtccaaaaaaaattgcatagcacatgaaaataaataacaagtccaaagttgccatggatatttttcatcaggcaaggaggcaaattgccctcatagcgtgcctatcatgtcaatttgccgatgagcagagaaccaaaatctatgattttgtgtgaatcgcttactcagtgagcgtatgcgagtcgagcttcctttatggtggaaaataggctggcaaatgtacttgttattttttgaatgtgctttaatctgcaattttcttagctaatctatcaattaaagaaattaatatattaaattcatcctcatttaactcatctcttaaagatttttcaattctaaggataaattcatatacatttctttgaatttccattcccttttctgttaatactattttttttagacgtgcatcttctaatacacttattctcttaatatgcccgttcttctccattaattgaagtacacttgtcactgaggaacgtctaatatcaagctcctcttctatatctttctgaaaaatgtcttttttatctgatttatgatatatgaatccaagaatcctagcttgaactccagtcacaccatattgtgaggcttctttatctattcttctatgtattctcttagacagcatactcatttttttcccaatacgtacctctttatccatacttatactcccatcagtttgttagatttctaacatatattattttagtttcactttttaaatttgtcaaggtaatataattttattttaaaaacaatacttttcaactcttagaaattaggttccttctatttattatcaattctttatatgatattttctatttttatttgatgaatcaaaatctccaataacaacttgaagcctttcattactgtatttatactcgtgcttaaaatctattattttttgaatatagaaactcaattgctacatatgtatattaaatttactatctctgtaacatacctaaaccctaatcataaaatgaatgagacaggctttactgccatagcaaaaatacaaggagattctcaatgtataatgatgattttttttactgtccgtattgtatgcagaaaaacacttgtccattttttgatgaacaaatgaaaaatttcagcgataatgatgaaatatcaagatttgatagatacgaagattcttatgaatttcaagattcaaacttattgactaaagaaattcactcagactcttatagagcttctgaccaagaagttaatagaatattaagattaatgcgtaatcaaatgcctcagcttttctcactactccaaggagttggcgataactattttagaaccgctattgctttcactttagataatgctcaaacatatccgggaaatataaatcaaagtgtaaatagaatttttaatgactttagaagaagaaataattcaatttttctttctcttcgttctctaggtgttcctaataacgttattaatctcacttttagatctataattgaatttactcttagaaacattaaaccttcaccagctcctggtccaaatcctactccatcgcctagtagtggttggagtaaatgggaggatcttggcggagttctaaaatattctcctggagtttcttcttggtctgcaaataggcttgatgtatttgtaactggatctgataatgctctttaccacaaatggtgggacggctctcgctggaatgatttcgaaaaccttggtggtgttctaacttctggtccagcagctgtttcttggggaaataataggatcgatgtatttggtaaaggttcaaataacgcaatgtaccataagtggtgggatggctctcgttggagtgattttgaagatctcggtggagttttaacatctgcacctgctgctgcttcctgggctgcaaacagaatagatacatttgtccgtggaacagacaatgctctttatcacaaatggtgggacggctctcgctggagtgacttcgaaaaccttggtggcgttctaacttctggtccagcggctgtttcttggggaaataatagaatagatgtatttgttcgcggtcagggaaatcgtctatatcataaatggtgggatggttcgcgctggaatgactttgaagaccttggtggaaatttggcatctgctcctgctgtatcatctcgagcttctaatagactagaggtatttgcacgaaatcaaagtaatcaattaattacaaaaacatggaatggttcgcgctggagcgattggcaaacaataggcggctcctttactttagatcctgcggctgtttcttggggctctaatagaaccgatgtatttgcaaaaggtccacgaaattctttattgcatatttggagagattaattagcataaattgctgaattataattttctaaaagaataaaaatgcttagtttttctgtactaagcattttttattgctataaactttacaagttaagcaacacatatcgattttttataaactcataaatccacaactaactttctgcatctgtgtattgttctttcgcttaatgaaaatctatggaaataaggttgtattaataataaataataaataaaaacaaccgattatatttttattaaagtaaacaatacattcaattaaccgattttattaaatagcaacttccaagaatacatttaacttctttttttattgccgctacagttacccctacttcttctgaatttgaataatcattaagttcaccataaattcctgcaattgaaagagaagtgagtggaaatataccatttttcccatatctatctgtagcagtaatatatctattacttctgtctttttcattaaaaaaatttaaaatcccatcattaaacttctttataatcttttcacatacttcttcacattcttcaattggattttctaaaatacttacaaaatcgtctcctcctatatgtccaatgaatccattataagggaaaagcgattttatttcagcttgtattaattgagctgtatatttaagaatcctatctccattttcaaatccgtatgtgtcattataaactttaaaattatctaggtctagataaagaatacaacatttacgttttgttttaattatattcattatattattttgtatagcggtattacctggtagctcagtaaggggattaagttgtctcgcgtagttacattctagcattgtagtataatttaacaaagatcttattgtaaccattccacagtatttattattgttagttacgataatataatcatatatattttgtgttttcctagacattgctagccttgaaacttctgttactggtgtgttgtaatctacaactaaaggatttgtatccataactaaagaaacaggacgttttgtaaaaattgcaacaccatattttgtagcaagtgctgagtctaacgtatgtttcataataagacctaatggtacatcattatttactatacaggctccagtaatatcgttagaatcaaaatattctttaatatcaccacaataagttttaggcccaaatggactatcatgtctaataatttcgcctatactgcttgactgatagttataatacacattatccttgaatttattacaccttacaattaaatctctaatatgattaggtatatctagaaaagttcccgctggacgacttagtaagaaaccttgtcccgcatatacacctaagtttactaatgttctcaattcttcttctgtttctatcccttcagcaataagcttcatattcgttgcttccgatagcttaacaaaacactctactaatgattgtttaaatgaatcttcatttatatttctaattaagtccatatcaattttcacataatgtggctttgtttcattaagcatcttaagccctgaatatcctgagccagtgtcatcaattgcaattttgtatccttgatctacataattgctaagagcttgtttaaatcctttgtaatcttctatgcacgtcttttcggtaatctcaaatattatacaatcaggtgacatgttatgttctgcaagaaattccttagtaaagcccttcttaaatttttcgtctttaaaaatatggggatccacatttataaaaagatatttgtttttttcgatatttgtagctcttttaatagcttttattctacataattgttctaactcccatgttttattataaacctgagcagcattaaataacttatctggattttgcaatggtgagtctatcggccctctgcttaatgcctcataccctataatttccccatctaaaagtgaaacaatgggttgataaactgtagttatatttttactatttaatatattttccaactcctctgcctcattatatttcaaattatcaactaatgaatttaacatattataatctccccatatttcttctaattagctattatagtagctcttgtaaatatagttgaaatataacataatcttattaaaagtatttataatttttgttaagttaatgtaaaaacgtttatctagtcaaaactaaatttattacataaattggaattaacctattttgcttccataaacttatgatataattattgtaaagacaattctaaggaggcatcttcatgacaaaggttaataaattacctacagcaaaactgtggaatccgaaatcatttattatattttccgtatttttctcatttctgccagctggaatcatgtgtgctttgaattatggacgatctggaagtcaaaaaaagaagtggatatttcttttagcaagcatcttagtgtttatagcacttatagcacttctgcctatattatcaattaatacttctatcatatttttcagtattaatatagctttaggcataattcttatgtttacacagttaaagctgtataatgaacatattcaaaatggcgggcaaagtgcttcgtatttatttcctataatcatagggcttttgattttttcattgtcagctgcttcaattctatactcaatttacgtgccaaaaaatgctcttgattatggcgaaaatcacttattttatactaataagataacagaatcccaagcgaaaaaacttggagattatttaaattcagaaggatacttcactcctagttcaaaagtggacgttaagattgataaacaagatacactctatattttatctctcgttgtagaaggtgactataaaagtgatacaagctatgtagaacctatgaaagcaatatcaaaagagatttcaaaaaatgtttttgaaaataataaagttagaatagatttatgcaatgatagattcaaggttcttaattccatcaatgttgattaaacttttcttatagactctacgatataggcaaaccaactaagacctgaacttatgcgtatatctcaccgaaatgaggattatgcttttattctaaatttcagcaaaaacaagactagcatttatttgctagtcttctttcatatttatataattaaatgagattattgtatgatatttcatttcttcttgaatatacaaagtaaatctcctctttctcttaagaatttatacatttcaaaacataggctggtggtaagttaaagataactctttctatatttatctttttaaaatatccagtaataaattcttttttcaaaagagtatattgaaatgttataaataatccatttctttttaatatatttctagtttgtcttaaaattttatttgaaacatctttaggaagactagcaaaaggcagccccgatacaacatagtctactctgctaagattatattttgctaaatgtttgtctacattttcagcagaatcatttattattataatatcatcttctcctttatatttctcttctaattgtctgcaaaattcttcattatattcaaataacattaatactgtctctttcttttttctttttaccagcttgtccgtaaaaactcctgtccctggcccgtactcaattataacctcagaatttttaaaatctatgtctcctaccattttctctgcaagtttctctgaactaggtgctacagcccctatagttctaggtgatttaaaatattcaatcaaaaattttactagcttcatattaaaagcctccttgaattcttctcttttagttaaattatagaattagtataagtcttaaatattaaaaatctatttagtaaaatattaataatctttaaattttgttttaaatataaagaaagaaggtatacactttaaccctcttttagactttattttatatataatgtgcttttaaattaatttttgttctttttaatttaaattatttcttactgtattaatcatactttccttattttcctctagttgaactaacctatttacattagctccagatggatgtggaaatccttttaatatttgcttttcgtttataattttattttcacatagcttgtataatacttcctctactgacctgcctaatggtactataagaattttatctaaattatttaatgcttttaattcataaataaaattctcataaatatatttcatcaaaaattcattcttaataagttttggagtgtgacctgaatagttttttccttttacaaagactgcataaggtattaatgaaaatgtgtgcaataaatgatctttttcttcaaacaattggctgcaattttctatttttagactcttattaagttctatttcatctaacataccaattaagttttttctaagactaccgctaaaccttcctgctttcttgcatttatactgaatttctctaatattatcagagttctctaactctcttcttgcagtagcaatggccgtactcatttgctggaagcctggagttataccaacaataaatacccttgcgtctaaatttatatattcattatgaggcgaataatatatttcaagatcttctttcttatcaattaaaaaatcttttatcaatagttcattcttattgtatttctcttttactggcaattttttaattttatctctataatcatataatgtttttttcataatcagcctctaacttctacatttattttactactttatattatctgcaaataaaaaaaatattattaatatatccttcactaataattataaatttaatggaaatttttttaatagaatataaaaaagatagaagcttcataataaagctactatctttatattcttcttaactattagctaattttgcaatcctctcatttgagccttttgtaaatactccaccatgataacagatgactgtttctatatcatattttgtgagcttcttaagagattccattgcttgctccatatcaaatgtatattctggattaggaccaattaattcattatttacaacattcattgcgtctccagttaccaatgccttatactttcttagatagagacaaatatgtcccggagtatgtcctggagtataaattacctctatccctccacaataaggaagattctcttcatctttaacaatcctattaacttttgttttaagctgctttatggtttccttcatagcttctggcattgaactcaaacgctcaggagtaatttttataccgattttatctccctcaatataaggtctttctccactatgtgctaacacttctatttcacttttagaatttttaacaatactcgataagctgcccatatgatctaaatcgtgatgagtaataattattttattaattctgtcaaatgatacacctgctttttccacttcttcgcgaatattttctagttgcccaggtaaccctgcatctattaaaattacatttttatcatcccaaattagtgtggcattcattcttctttcttcgctacccaattcaagtacatctaatccttctgcaattttcatttttcttcctcctaattaaaatttactcctcaattaattttcccatttgactaataaccattttgtaatactcacctttttcattcataagacttttgtggtttccactttctaatatttttccaccaccaattaccataatgcgatctgcatctctaatagtcgataatctgtgtgctattaaaaagctagtacggtttttcattaatcttaataatgcatgttgaatatctttttctgtctttgtatctacactgctagttgcttcgtccaaaattaaaatcgggctatcacacagaactgctctagcaatagacattaattggcgctgcccttgacttaagttatctgtagctccagaaaccaatgtttgataacctttaggaagtttatcaataaattcatgagcatgagctattttagcagcatttacaacctgttcatctgttgcatcttttttagaataacgaatattatccataatcgttccagtgaaaagacaagtatcttgaagcacaacagagaagcatttcctaagactatttctttttatattcgtaataggctcatcatcaatgaatatatttccactgtctgcatcataaaatcgagtaagaagattcacaatagtagtttttcctgctccagtctctcctactagcgcaactgtttctcctgctttaactttaaaactcacattctttaatataggtatagacttatcatatgaaaaatatacattttcaaaggttacatcaccatttggttgctttatctcaattgcatctttaaaatcttcactttcttcttcattatctaaaatctcaaaaacacgttctgccccagcaagtgctgattgaattgtattaaacatacctgctacagaatttaatggctgtgaaaattgttttgaatagcttaaaaaactaactacagttccaacagctacaccataccctacggatagcataccaccaacaattgcaacaactgcaaaaataaagttattaataacattcataagaggcatcatatacccagaccatatttgcgctttattactgctttcatatagattttcgtttatctcttcaaattgctttaggacatcctcctgtttattaaaagcctttaccatctttagtcctaatatattttcctcaattacgccattaagtgagcctaaatttctttgctgagctaggaaatatttgcggctatgcgttgcaattacacgtgttaaaagtataactagaggtatacataataaaacaactagtgtaaggggaacatttaacactatcataaccataaaagatccaactaaagttaaaatacttgatattaactgtgtagttgtttgtgcaattgtagagctaatattgtctacatcatttgtgattctactcattgtatctccatgggaacgtgtatcataaaatttcaaaggaagcctctgcatcttttcaaaaaactctgcacgtattacaaaaacaagtttttgtgaaactttaagcataataacaccatttatccatgaaataagacaattaactccatacaaaactgcaattataattaaaaataatataagagtcgatttatctacagttcttgttgctattctaaatgtatcaaaagtctttcctacaaaataaggaatcccaacagaaattgctgatgaaaaagctgtaaaaatcatagctagaaagatcgtcttagcaaaacgcatgtatattttaataatacgcactaatgtgcctctagcatttttagctttttgtgtaggtgcaaagcgatttccgcctccacccacacgtctcccactaatagaaggtacttttacttcagttttagaaaattgttgtgtcataatatcctatacctccttgctgctctctatttgcgttttataaatatctatatatatttcacagctttgcattaattcatcatgagttccatacccaaccttagatccattatccataaccaaaattctgtctgcaaacatcgctgttccacaacgttgagtgattgtaatcacagtttgattacttgtttttgaacctaagttttctctaacctttgcttctgttactgaatctaatgcacttgttgcatcatctaatataattacagacgaatccctaagtattccacgagctatagaaatacgttgcttttggccacccgaaagattaactccagcactccctaacatactttcatatccatctttcatattatttataaaacctgcttgtgccttttcagaagcctcatgaaccatcacattgctcgcttcccttttaccccatctaatattttcagcaacagaaccagaaaaaagcattggtttctgcggcactatagcaatgctatttcgtacagaatcaacatttaattctttaacatcgtagccgtcaattaaaatttttcccttgttcacatcataaaatcgcaaaagaagccatgcaatagtagatttcccgctgcctgttggaccaattatagctaaactttgtccacttctaatagaaaacgatagattatttaaagcaggtacaccactaccatttggatatgcaaatgtaacatctctaaattcaatattaccatttaattctttcatttcaccatcatgagaaaaatctccatcacaatcaactatttctttaatacgagcagtagaagccttggttcttacaaatgtattgaatatatttgttatcataattaatgaggtaagaatttgtgccatataaattacaaacgctgatatatctcctggatttgcaaggtttgctgaaaagagactgctacctgctaaaattacaattattgttccaattccaacagtaagagttataagtggtgacacaaatgtaataacactttgagatgatattcctttttccattaagtttgtatttgcattttcaaacttactactttccttatcatatgttccaaaggccttgactaagcgtacacctataagatattcctgaacaactgaatttactttatccatcgccttttgtaattcataaaaacgcggataacttaacttcatactaataataataagtatcgacacaatcgcaacaacaccatatataataaggctcaacctaaaattaagcagtgttgcaagcacaatactacctatgcatgtaatcggagcctttaaaaaaattctcataattccattaacgaacaatataacctgtgccgtatcatttgtcatacgtgtaattagagatccactttcaatcttatctgtgcttaattctgaaaaataaacaatcttttcaaataagtcatacctaagatctgctcccattctttgagataccttacttgctaaaatatttcttgtaactgcgaaaacagctccaattgcagttactataagcataagcattccccagtaataaactttagaaagtgatccttgctcaattcccgtattaattatgttagacataagtgttggaccgagcaaatcacaaattgcttcagatgcaacacaaaaaacagctatcccaaatggaattttatacttattaaaatatttgctgtataagttcatatcctttattcctttcctttgtttaaatgctaatttccataccatattatacatcatttttgcatacagaatacaataaatatttccagccgcttgtacgcgttacctaacagctataatatttcctatcaatcattacttaaagtgactctcagatatcaattcatatttttagttcttattatttctttcagttataatctctttcagttcatctctagaaatcttctcatcatagtagtctagtttcatatttacaagttctagaagatcattatattttttgatttcttccttaagtatttctttttgttcaagcataatatttcttctttcatccactgtatcctttccctttgtagtcaaactaacataattttttatatacgcaattgacattcctgtagccctcatgcagttaacaagctgaatagatcccagatcaacatctgtgtatattcttctgccattattatcgcgttgaacaaaaggcaataacccctcacgctcataatatcttaatgtatacggtgttatattaaatttttcagaaacttctttcattgaatatttcataagtcacactcccaaatatctcaaaaattatttaaatctataagttctattagcaaaattcatacactataaaattacttcatctagatatattatctatatatgcaaatctctatgcttaatgaaatatattactgaactctacttataagacgataaaatcatctttcatttttttatttatcattttctcttatttcagtttcatcatattagttattataaaagttaatatatctaaaaatcaatacattagaaaataactaaaaaaatataagaaaatttcctattgacttacactgcactctaacaaatatactcatcttatactacaagattggtgaaaagaatgttattctttcatttctataatcttgtaaatcaaattattttttaaggagaaagatatatgaaaaatactactcaagcaccaataaattcaaaatataatttttttacaactgcaaaagatgttatagatggtataaacttgaaaggtaaaattgcaattgttactggcggatattctggaattgggatggaaacagcaaaagttttagctgaagctggtgcaacagtaataattcctgctagagatatagaaaaagcaaaaggagctatggataatattccaaatatagaaattgaacatttagaccttatggatccaatgtctattgatagtttcgcacaaaagtttataaattctcaaagatctcttcatattttaataaatagcgctggaataatggcacctccactaataagggacaaaagaggttatgaatctcaatttgcgacaaatcatctaggtcatttccagttaacagcacgactttggcctgctctaaaaaatgctaaaagtgctagagttatttcagtttcatcaagagcgcagcgtcttggcggagtcaattttgatgatccaaactttcaaaaaacagaatatgatagttggaaggcttatgctcaatcaaaatctgctaattcattattcgccgttgaattagacagattaggaaaaacccatggtgttagggctttctcagttcacccaggtttaattccaactacaaatcttggaagattctctgttaatggaaaaactactgtacaagaactaaaaactaacactagaaaagatgacactaatacaaaatcaaatgaatttaaaaccattgaacaaggtgcagcaacctctgtatggtgtgctacaaatagtattttagatggaatgggtggagtttactgtgaagactgcaatatcgctgaggctgttccttatgacagtttgaaagataatggtgttcgcccttgggctatagataaaaatctagcaaaaaaactgtggatacttagtgaggagcttacaaatgttaaattcataatttaagttttcttaatataatttttagcatttaatcaagtataattaattagttttatcttcattaaatatttacaaaactaaatcttccacgtattaataagtttacttttttcaataataactatataacttatctttaagttatttaaatttttatttagagtattttaatatattataaataattttttagattattatgttaggagtgatttcaatgaaaagaggaaaaacactagatgatcaaacaccaagcgtctatgatactgaaaaaattattgatatccattcatctgaggacgatccatcccttgattcagaaaaagtaagatacgctaacagtcatgcttcacgttcaaaatatactcatggttcaagcgacgtaagccctgttaatacaaaaaatccagactctacagaaagaattcccacatcagttagatattctgattctgacatacataaagatgatgatgaatttgactatcaaggtgaaatataaattatctatataaatcaaaaccaacgacagcatatttatgtattgtcgttggttccatctttatttttcaaataatatatgtcttttattcaccatatttcttatggtacttaacttgaacttctatattaggatgctttttgcaaaactggctaattacaaagcagcaacttggacaaggctcccatttgctatataaagttaagtttccctcatctttcaatacttttgcttctatctgtttatgtatttcttcaattatctttttttcactatcattgattctgtcatatccaattccgaactcacccaatttgttaactttattacttttaaaaaatgattcatctttcgttggtgcatgacaataatcctttatattattacttccgcttatcgccttgaattctttattatcatatattgctactgcaatatttatagaatcctgtaatgttttactttgatttattttaaatattgatctttcttcttcatcggctttcatatacttattaatattctttattaatcgctgcattctcggtatattattacttagatgttgatgatattcaacagtgcctttttgtggtcttatatagtgataatctatttgctttggaatttctatagatattgttttaactttagtattaatattataactttcttttactctttcttctttaataagaagcattttcttcaaaagctcaatatcctttgaatataaataatcattatctaattctttttccaaaatttctaatttctctttttctttttcacttactattctggatactctttttttaacttcttttatgtcaatcagcatatctttaacatcatctctagatactgcatctcgctcatattcaatcctatttatatttaatatttttattgaatttatttttttccataatctatcatgttcatattcaaatagtattatttttttcatgtaattaattaaatcactaacatcatctgctctgtaagtggcctgctcctcaccaatacatttatataattcctctatgagactattctctactttaaaagccttggcaacttctattttaaatttctcttcatcaaagtaatttattttatagccttcttttttcaatgcatctttaaaatcatttaaattattaatctttattcgttctttttttcttttatttgagattatgtttattttagtcatacttccctcttatgttttatgcttatctaaatatattactgattttaactctttaacaatttaatcattatatcataaattttaaaatgattataatcaaataccgatacgatttaaaaataatcataagattataaacataaaaatatcatgtaaaatttatatggtataataatacttatcgtgaattataatgcaattaatcatacttttgttataaacaatttagctttaattatagaaaaaagtagcttaataatgtactaaaataaagaacatagtagaaacatataaaataaaatatattaaatctaataaatattttcaggaatataaagttcattaatctaaaaacattaatatggggtggcagtatgttaaaaaatatatcaataaaattaaaggaggtaaattttgtagctctaacgggcatcattattatttcaattatactattaacaaattttgtaaaggttctaaaatatagttattttgaacttattgatgatgataaatatatgaacttatcaaacaatgtagaatacttcatccctaaagataatcaatatgcagaaataaaccaagtagcagataatagttatattaaatttgaaaaaaacaattctaaaaatatctactttcctgaagatgttcaaaaagtctggcttaaactaagattacaaggtatacaagctagcactgataatataatgtacattgattgtgaattcattgaaaatattcaattttatattccaactactgatggcaagtatgtaactgaaaagcctaatgaatactttatttttccatatattaatctacctgaaaatattgattttaatagagatatctatataaattcaacttgggattcaaatgtatttaatttacttctagcaaaagacagtaacttttatattattcaaaacttgttagcatgtttttatatcggtaatttgggtgtactcctaggaatgcttattatgaatatgattctattcttttcatcaaaagataagaagtatttatttcattcactttttacaggatcactgctttcactactatattgcttatctggaatgcaaaagttaattctaggatttaatagtaataacaggcttatagcattaggtgcaatggccgcttcaacctgggttttatttatatattcatacttagatataaaaaaacacatgcccatattaaataatttttttaaactttcaatactttttctcgtactttctctctatatatctaaaattattcctgacggatttacttatgatattttatatttgcagatgatcctagtaggattatatattcttatttcaatatattcttattttaaatttggtatgggatctatatattacttggttggcatatttatactatttactggctttatcatatatattttaggttcttacggtttactagaatggaatatttttgcttttagtacatgctatcctgctgcctccattgaaacattattatttaccatcggaattataaaacaaataaaacatgaaaaagaagttaatactaagcttcaattagaagttataacagataaacttacaaatatatataatagacgctattttgaagaaacagttgtaaataaaattcttcaactcgaaaaagaaaagagtcttgtatcaatgttggttcttgatattgatcactttaaaaaagttaatgatacctatggacatagtactggagacctagttttatctgaaacagctatgattattaaacagtgccttagaaaagaagacattcttgttagatggggtggagaagaatttgttgcagtactccccttcacagattcaaaagaaagtactataattgctgaaacaataagattatccatagaaaatcataaattcaaatttgtaaataaaataactgttagcataggcatagccgaaaaagatgtagttgaggattttcatagctggtttaggcgtgctgacaatgccttatataatgcaaaagagaatggtagaaatactgtttgcatttgttatacaaatgaaataagaaataattcctagcatcaaaattactacgaaactataatcatatttagagtttaaacattcatcacgtctaaactcttttattttgttttatttttagcttcatattctggccataccctttttccccattcatttataattgctaatgcgggaagtaaatcattacagtcatcagtcaaagaatattctacatgcggtggaatcttattatattctgttctttttataagtccatgttcttctaatgcttgcagagatcgagtcagcataatattagttataccaggtatgcttctcttaagttcattatacctaatgctctttgaacctgatatctcccatataataggtagcctccacttacctcctataatttcaagtgcgtgaagaacaggacatgctttagaatacttgttttgtactttttctgtttcacctttcataagtaatcccccttaaaactaaggcacaaaaatgtgcgtacttgttattatgtttcctattaaattataatattaacataccagacaaatggtaatatgtaaataagtcaaaatgggagtgtggatattttgaaaaagttattctcagaatttagtattaaaaatatagaaataaaaaaccgcatatgtgtacctccaatggttgtaggtttagccaaagatggatatgtaacatcagaaaatttagaccgttataaggaattagctaaaggcggtccaggacttataatacaagaagctacatgtattaataaagatggaagattatcagaaaagcaaattggaatttgggaagataaccaaattgaaggattaaaaaacatagttaatgcagttcatgaagaaggatgtaaaatatttattcaaattcatcatgctggagttacaggaatctctaaatctcctctatgtccaagtccatatgaatataaaggttttgccggaacagttattggacgtgaaatgactaaagaagatatagaatcaatacaaaaagactatattgaagctgtaagaagagcttatgaagctggatatgatggtgttgagctacacggatgtcatggttacttaataagtcaatttttaaataagaatgttaataaaagaactgatgaatatggcactaacccagaaagatttgtactagaaatactagaaggaattagaaaagtaactcctgaagaatttgttattggaattcgtctaggaggatttgaaccatcaatagaagatggagtaagttatgctaaaatattagataagagtggaatagattttcttgatatttcttatggattctttaatgaacaagaaattaatataagcaaagattataagtattccaatgctgtttatgctgctgagaagatcaagcaagaagtatcaattccagtatttgcagttaatggaattaattcagccgaaattgcagaagaaatattaaatgaaacaaatgtagatatcgttgatattggtaaagggattcttataaatcctaattgggcaaaccatgctatggatggaaaagatactggaaaatgtttaaattgtgcaaagtgcatgtggtttggccaatctgaagtgtgtcctggaaaagttatattcgataagaataataaataaaatgttttctaaactgtaaatttaattacagtaaaaaagatacaatgcttatgtattatatgcattgtatctttttcgctactttttgtttttaattattttaatgctgaaattacttcttcgcttgttctaattcttccaatcctaggaagtgaaagttctctatttacgattccattttgcaaatctataagaactaatgcagttttttctatattaataaatttattttccactgacttgaagttttccatttcttatccccttttcatacttctccattctatgattattatttatattaagtttattatacactttaaaatatactagtactgcattaattaataacaatgcactcgttacaaaaaatacgcattttattcctaaatatcctgcgatttgtcctcctagaactgatcctgcaaatacacctagatatcctgctgccatactaaaaccaaatactctacctgtaagagcggatggtgtaattttcttaaccaatatattaacagaagggttaagaccaccaactgtgagtcctagtaaaaacctaagccccataagctcccaagtgttcgttacaaaagcttgaggtatgaatattattccagctattatgagacatattagcataactttatgtgctcctactttatcagagatccttccaagccttggagctgcaattatattagcaaaccctgatgcagaaaaagttattcccgctattaatgcaatatgactcgcttccttagatagttgggtaacataaactgttactattggctctaccgaatacattgctacagataatataaaaaaagttataaacaaagtaatggttaatcctttttccggaactgtattccaaacttctttgaaacttaaaactttattatcttcacgactaaaagattcctttacaaataatactgtagtaataaatgcaatgagcataagcccgcctgttataaaaaatacattttgcagaccaaaagtctctcctacaaatcctccaattgtaggtccaagtaaggaacctgcaatattcgctgttgaaatagttcctagagcatatcctgcatgttctttatctgtttgagttgcaattaaggtagtacaggctgtgctatatcctgtgatagctccttgtaataacctaagtgctattaatacatatacattaggtgcaaatcccatgcagcttataactatagccataccaagacttgccctaagcaacattggttttcgcccaaatttgtcagcagcatgtccccaaatgggtgaaaaaatagctgagataataaacgtactaccaaaagcaattccagaaagcctctctatcgaagccgcatcttgaattcctaaatgctgtatatatagtggtaatactggtgctatctgactcatgcctattcctgtcacgaacattccgaaccaacaaacttttaaatttcttttccacatttccataataaatttattccttcttactaattagttttgttattccaatacaataacttgtatattgtcttctaaatataagaataaactataaaatataatttgtaaactacatcttatagtttaataatcatttccaatttgataaaaataacctatcatgttaaactatctttattaatcagaattataagaggtgataaaatggttcagaaacgaaatttaactaaggaaaaaattattgaagcttcttttttactagctgatgaaattggacttaatcaaattactttccaaaagattgcagaaaaactggatataaaatatccgtctttatataatcattttgccaacattgaagagcttaaaataaaaatgaccatatactttttaaataacttaaattcaactttaatggaacgactaatcgggaaaagtggagagactgcaatcagagaatttgcttatgtatatcgagattttgcatttgaaaacaagagtggctataagctttacgtgaatatcccaagtactgaaagtgatgaagttaagcgcttagctagtgaaagtaatgcaataatacgtaaaattttagacttttatagcagtgataaaatatttataattcataaaagcagggctttaagaagtctattacatggattcgtttccctaagctctcacggatattttcaaaatccagtcaacttagaagacagctttaaattaatgatagatgactttattttatcaatatcagaaaaataactaaaaaatttttaaatcttaattcaaaatgttaactacatatctatattacaaatgataaattctatgttcagttgttattttgcaaaataaagcagtatatcataatgtaatttttgctgttctgctaatttttatattatgacatgctatattttgctcgtttataaggtatactgtaaaaaaagtcagaacaatagcacatattttcaatatattatagtgtactaatttttcaggtgataatatgcaggagaattataatgctaccatacattttctaactggtaacgatcaattagatttagaattgcttaatatagaactgcaaacatcatatgttgatttactggcgactgtacttggtatcatttcagcagtaaaagctaagcagataataattcaaagaatgatgcagcaacagcaatccccaagtcaacaagaacaacaaaaacagcagaatcagcagaagtctgatgtacaacatccaactccaagtgaaatagccgcatttgcaagctgtcttggtgtatatgtgattctttcttatactagagtttcatttataaggcttaacgaactatataataacattcagtcaggtaaaagtaacttttctattacacctaacataaatataactactggttttgtatactcttgtattggcactttattaagaacggttggagctattcaaagagtagaagaagaagcccaaataactattctataattaaagtcataaaataatctaagaattattttatgactttaattatttttctaaccaatattcaaaaatatattgccagaatttcaaataaacctagcaatatacctattattctaatttaactatttactctatacattaaactttccaactatttgttctaatttatctgcaatattcttaagctctattgcagaatgtgatatcttttccatagaattagattgctctgaaacagttgctgaaacttcttcaattgaagctgctgactgctctgctacagctgaaatttcttgaatgctgcttattgctgaatctttattttcatctatagactttatattagaagttaactcttctatattttctatagtatcatcaaatgtactatttataagttggaacgtattaatagcttctttagtagttttgcttacttctgtcattatgtttttttcttcatccatacttttcttagctgcatttatttctcttataatttcatttacaatgctttctatctccttagtggaatttgaagtctgttctgaaagttttcgtatctcatctgctacaaccgcaaatcccttacctgcttcccctgcttttgctgcctcaattgctgcatttaatgcaagaagattagtttgttctgaaatcgcttgaattgtatttattattttgcctgcagatcctgatttattagataataagtctatatttctaattactttttccaaagcttcattattagcattgatattatccataagatcccttgaagcactaataccttcttcgctaatatgctgcgatttttttgaaaactttgttactaaatctgcattatttgatgagacatctattttctctccaagatgcaataatttttcagaagtaagttctgtattccttgcttggtctaatgcgccaactgaaagctgatccaccgttgcagaaataccttgaattccctgaagcgtttcgttagttgaaactgcaattccttctgaatgatcaagtagctcttttgatttttctttaagaacttcaatattttcccttaactcttttcttagcgatgttacagctctagcaataattccaatttcatctttactttgaagtaatttctcgaattcatcttctttcttcatttctaaatctaggctagtagttttatttattaaattagttaccaatgaaatcggtcttgatattttacttgcaaaatataaagcaaccatagaaaaaataaccattaaaaatacaaacatggcaataaaactgataattaaaccggttagcggttttaaaaattcagcatttggaactgcaatacccattgtccattttgaagaagtaataggagctgttgcaaaatatttatttattccatcataatcttttagctttacaatattagattcagaactatcctttccaaccatgctacttaaacttccacttaatacatctctaatattctttagcttatctgcactcggctgaaaatctttattgggatgaatcacaaattcatctttttcatctaataaaaatccataactgttatttataggttgtgccttctgaacctcgttagagatactttccatatttatgtcagtacctaaaacgcctatgactgctccatcttttttaactgattttgcaactgtaacgactaacttcttagtttcagaatctatgtatggatcagaataaattactgagtcactttttaaagcatctttataccaatctctctctgtacaattaaagtcattatccggtatccatccatcttcatcaacaaaacttttatcttgaaaaccaaaatatatatccataatatcggtatttgactctgctttaactttcatatatttcaaaaggtttgtactatcataattattgttaaattcgatgttttcagctgtttcattaacaaagtttccttgattagccatccatttgtctatagtttctgcatatttttcagatagtacccctagtttatcctttgattcaaccacagtggttctataaaacagataataacttatcgtcgaagaacataataaactaaaaaaacaaactgctacgaccaatagaataacttttgtcttaatgtttttcattttaattcacttcctgtttgattttaaaatttgtataacaatgttaaacataaatattccttataaccaatacattatatgtattgatttctttatctttagtaacatggaaaataccattaacttaagttacgcttcttatatagttaatatatttcatataattcgccttctttctacaaaactgttttaattctaatatatattctagagtatactcaaagtcaatgtataacttttacatatttggattttacaataatttctcttttataaaataatcctttatttattgttttataaaatcacaaaaccaggagtaaaaatctccatgttcacagagatctatgctcttggttcttattaggtttataattagaaatattaagtttatttaggtttaatagttgtttgaataataaataatttcttattatttagctaactactttgattaattaaataaaatgggtaattctataacgactttagcccctccaagtttttctgattttccaagtgaaatattcccgttgtgtttttccataaatttttttgcaatatataaacccataccataatgatttttggaatttctactcttgtcgccttggaaaaactgctctgtagctaactgtaattcctcttctgtaaatcctcttcctgaatcttcaatggtgaatcttatattatcattatctgaatcaaccccaaatgctattttcccattttcagagcaatattcaaccgcgttcgaaataatattgcttaaagctcgctttaaagccagttcatctcctataataacttctggaatatgtttaatttcatttctaaactctacttttttatttatacctatggaaattccttgttcaattatatcctgtataaattcttctaactttattttctttttttctaatgttgattctttctcggttttcataatttctattaatgatttaatataatcttctatattcttaatctcgtttaatatactatcgttaaattcagcctgatcttcttttaaatctagctcacttaaaagctccgagtttcccttaataattgttaatggtgtctttatatcatgagccaatgctgccatttgctctttgcgtgcttcttccatcttccattgtttacttagagaatcattcaactctgtcttcattttatcaagcgcagaaatgacttcattgatttctaatatattcgaatatttcacctcaaattctaagttctccatctgtatattttctgtagtctcttttaaaatctgtagttctttagatattcttcttctaaagcacttagatagaattataatttcaatgctaaacaaaataaaatataataaaattaaactaagctcagcattttgaacatactttttcaaagcaggattaacaaaacttgcccctatggtgtattcaactacacagattccattctcccttgaaataactttgtaataatattttccttcactcctcttatcactttgcacaagattccaaatatctatagctttagtttctgatacattgctataaaatacatttccaatagaatcatacactatataattacactcatccggtataaagtcttttactttaacaccctctacttttgctatttcttctctttgtttttcaattttctgctcatagtagtttgctggtaaaataaacccactattcaaaccaatttgaaatagaataaaatcaaatatagctaaaagaattgtaactatacaaaagaacattatgtatattgcgaaaatcttagaaatgcttttttgcttcttcactctttccatttatatcctatcccccaaacagtttctatagggtttattcctaccttcttaaacttatttcttatatttttaatatgctccacaatcgctgtagtatcgctatttccatcaaaaccaaatacactttcatatattctctccttggaaaatacctgcccatgatttagagcaagatactcgcatatattatactcactttttgtaaaaggtactaattcttcattataataagcctcttttgcagttatattgaattttatatcagaaatagaaaaagcattttgtttttccctatgttcacgtcttaaatgtgcagctacccttgctcgaagctcacctatactaaaaggctttgatatataatcatctccaccaatacttaatcccattacaatatcttgttccatagtttttgctgtcaaaaatatgattggacaatcaaccagactacgtatctctttgcacagagaaaatccatctatttctggcatcattacatcaagtaaaattaaatcgtattttacatactgatcctttgatatatccgtaggattagaaactatagttacattatgtccttctctttctaatgcaccttttataacctttaatatgccttgctcatcatctatcgctagaatatatgccatttccatccctcctacatctattatacccaatattaccagctaatctttattattgtataaattattgttacttctctcccctaccttcaaaaaagttaaaccaaactccaagataaatcccaaagaagattgtgaataaaacacaatttctaaccccaatagcgctattaccaaatacagtagtaatatcagccagcttattaaagttgtctgcggaatcagaagctttcacaaaaaaattatcacaaaatttaactgaccatccacaaggtatccattgccatattccatctccaagccctgtaatcagcaaagctgataataagctttcaagtatgcccattcctatcgatgctccacttcctattttaatactcaaccataagtgaaataaataaaagaagatttgaactccaaatataataaaaattatatttaagtaaaaatttagtggtagagtattttgccttaaaataaattgaaatccagcgaaaaaaatgccaaccgctaaactaagcgaaaataaacctgtaagaagtagaattaatattttactcaaaagacacattccttttccatattctatagatagcatttctttaaattttccagccattacttcttgttctatagccattgaacaaacaattccgattaatacaggaaatgttaatgataatacttctaaatatccatttattttgtttacagaattccaagttgaaaatgaataatattccaaaaatattattgttcctataattggtaaacaaatatgaatccaataaaagggtgtgtgcttcatttttataaagtctgccttcaataagcgaagaattttcattatattactttgcctcctgtctatcataccatttagctgttaaataagttatcaatataaataaaactattgaaattccgataccaagaggtatcccccaactcttaagtagctctggtgtaaaagtttgactttctggtttagctattaaaccatttggtaataattttaaaattggacacattagtctcgatgtatacgaaaaaggatttatccaccaaaactcctttactgccataactattgaaaatatattaactgctaggcttaatactatagttggaaatagtcctattttatttccaagaaaaaagtataatggaacctgccacattgaggttataatgatcactaaagttccggctaaaccacttaacatcgaaatatgtgatatgctatccattttaataaagaatacacttaactctccagctataaaaataactatacaagaaatagcgatattctttactcccaccaatattttagcaatccatattttatctaaatccactggaagtgatataaccgctttatttttcatataaccatcaatccttgataaaaggcaacttcctagtgagatagctccaggaagtattaatgtataccaccaattataaatatcaacctgaaaataatttgatgctaaaaatcctgaaagaagaattaccataattggtgctatccatactaatttctttacaaacgtatgatttatcttcatattttctgaaataaaatatttaagcatcattatttctccctcctatattgtttagcgatatctataaataatttttctaaatcttcacctttttttaattctccttgatatcctaaaataccgccagatataattccaatatgatcagcaatctgttctacttcacttaacatatgactggataatattaccgtaatgcctttcttgggaaaggatcgtattaactctcttaattcttgtattccaaatggatcaagtccgttagttggctcatctaaaattaagagtttaggattattaagtaatgcaatagcaatccccaatctctgcttcattcccatagaaaattgtcctgctctctttttacctgtattttcaagctctactacatgaagaacttcttcaattcttgagtccggtaatccaagtactgtagtacgaacctttaaattctcttttgccgttagattttcatataaaggcgctgattctattaatgacccaatttcgcgtaaatcctttctactccatttatgtccatcaaataagatttctcccgaacttggtctaagcattcccgtaaccatctttaatagtgttgactttcctgctccatttggaccaagcaacccatatattgaattctttttaactaatactgaaatatctttaactgcttcttgctttttaaagtttttacataagttttttgtttctaaaataaattcgttcatcttcactcctcctcttataattaaataataagccttaattataaggaatttataaggaactgaaatttaagaaacttacttgtatttaaaaataaaaaatccctcagtaacgctttcgtacggcattactgaaggtataatttctttagtcttcaatttaacatatataatattttataaatatatatgtcgcaattcacaatgcacaattcacaattacagctaaaattcttacaatatttttagaattatgataaagaattatttttacaatatatattttttttctgaataataaattattgttctttatgctattttatcagtattattataactatctctaagttttaagtaataggtagccactgtgacgttcatataaggaaccacccataatagccctatacatattggaatcattccaagtattatccaccctaaaaaacttaaagtaaggacgaagtactcaaatttatgccctttcataatagctgagctctcttttaaacattgaattattgacttattattatcatcagctaaaataaaaaatgattgtgaaaacatatatataaatataatgcctggaactatcactaaaaataatcctatggtaacaattatagtcaataaaatatataggcctacagctttatgaattattgaaaatcctgaaaatatatctgtaaatttagggttactatctctttcagcatagtttagagaaaatttgcatatgccaactcctattgctgcactaacaaatattgttactaaaaatactattaaactcaaaccaaaactttctctaacaactcttaaaattaaattaaaaataattggaatcagaaatccagcaacaaaaattcctccaatagccagtccccacctcccttttagttgatctttggcatatctcttcagttctgccctagtattcataaaaattcctccttaaattgaaatacctttgatatttatgcagggagatttaacattatgctatatttatattttaatttacagtaatcgcatgaatttataaatatacattaatcttttgtataatttatatactttttgtaaaagttttcattcgagtaattcataatttcaacataattatctatcttgcacttaacttctatattaatatttcataattaaggatatatcacacaatttgcattaaatatcagttataaaactgcaaataaaaagactgttataaaataaatttttagaacaacataaatagtctttaataaaaaaacagtacttatattgttctatcttttattctaaaacagccacttttattttatattacagccttataatacagctaaaatttcatcatctttctgaatataaagctttatcttactaattcttttttcctttacttcttctattttaaagatcaagttttcatattctatctcttgttcatctgtattactaggaatacgttcaagaatttcaataataaaaccactcatagtatcataattctcacttttaatatctgtatcgaagtaattattaaaatcattaattgaaagcatacctgatatcataaaagtgtcattatccatttcttctattgatggctcatcctcatcatattcatcatctatatttcccatgacttcttctattaaatcctcaatagaaactatacctgaaaatcccccatactcatctactaatacagcaatatgctttttagtactttgaagctccttaaataacctatcaatatttctattttctggaacaaaataaggtggatgcaatatgcttcttatatccacattttcaaatccatattttcttgcttcactgaagaaatccttcatataaagaataccaattatattatcagtatcatcttcgtaaacaggaactcttgaatatctttcatcaatcaattcatccaaatattccattaatggatcttctatattaatcatatatacttctgttctcggtgtcattacttcgcatgctaatttatcatcaaactcaaatatgctatttatcatttctgtttcagtcttatttatgactccatgttctagtccagcttctacataagatttgatttcctcttttgatactttttcacctaaatcttctttatcaagcccaatcagtttaactaatatattagttgatgctgaaagcaaccttacaaatggaactgcaattttagctataatcactaatggctttacacaaaacattgcaatagcttctgattttttaagtgctattctctttggaaaaagttctccaaataccaaggtaatataagataatacaattgttactaatgccaaggcaacttgtccactgtaaggaacattaattccctttaaataaagagctacatcctttgatagtcctgttgctgctgaagcactactaaaaaatcctgcaagagttattcctacctgtacagtagataaaaaattagtaggctcttccataagtttcaataaaagcttggccttcttatttccttcttcctcaagaagctttattttatttttatttaatgatactatagacatttctgctgacgcgaaaaatgcattgatcaaagtcaatatgactattaaaattaattgtgacgtgatactcgtctgttccgggtctaaatccataaaaatatttcctccaacataaaatttttttaatataatcatatcacaagaaatatttaaagtaaaatttcaattaattcaaatattccttatttacatataatattaagtgttatagcaatttgattcactaatatttaaattttataaaatattatattaattctgggagttgcatatgcattaattaacttatttccttatataaatcttttattatattctctttcattaatactgaactcaagtcctgttacttcttagtatttatacgatacatttatattcttatttgttggtgaaataaattttactgactattaccataaagatgacaagttaggataattgactttttaattgttctttatccattgtatactttaatcttttaatttcattaccatgatctaacacaattatttcaggcacatttctaacattatattttcctataagatttttctttgtggctatatttacttctttaatcctatagcaatcaactaattccctatttacctcttctagcagtgttctaaatcttaagttttcattaactaaagcatctaaaaatagtaataatactcttttttcactttttagaatactttcattaaagtcatttaattcttcaatgtaacgctcagctgccacagccgcagttgctccatcaccagcagcggaaacaacctgtcttaaatatttaactctattatctcctattgcataaactccttcaaagctagtttccataagttcatttgcagatatataccctcttgaatcaacttcaagaccgctattttttagaaaattagttgatggtaccatacctacaaagaaaaatacaccttggcagtttacctcttctatatttccagtctttaagttcttaatttttactccttctacattttcagtcccaagaacttcctctattgttgaattccagataaactctatcttttcattattgagagccctttcgctacttactttattacaatctagaatcccttcatcatgaagcactataacagtcactttacgcgcaaactttgtaatatacagaccttcttcaatagcctgatcaccacttccaactactacaacatgttctccttcaaaaaactctgcatcacaagttgcgcaatatgctactccattgcctttgagtctcttttccccagagatgtttaatgatctaggttcgctgccacaagctataataatagccttagctaagaattgctttccttttttagtggtaatgagtttttctcttaaggacaaattagtatctacaacctcatctcttagaaactcaactccaaagctctctgcatgtttcttaaagtttttcataagttctggcccgctaatttgttcataaccaggataattaactatttctcttgttgtatttacaagacctccaactactcctttattaattaccagagttttaagtttagctcttccaccataaattgctgctgaaagtcctgcagggccaccacctatgataatcaaatcgtagaaattagtcatatcgtccatacttttaatcactcctcaaaaacttcaacaattttttcttcaactgcatcttcttccacatgaccggctaattttccttggtactcaccatctttaaaaaacagaatttgaggaacaccttttaaagaaaatctctgaaataaattcttttgttcttcaacgtcaacataataaaaattatacttaccatcatattttaactttaaatcttctaaaattggtactacaccttgacatacactgcagctttccctagaaaaaatcactaggctggattcagcgttgtcatatataatttcatcaaattcattagaatctaaatgttgtaaagacatactattcactcctctataattattttaaaaccttaattttaagagactataattccggacaccttataatcaatttattaaataaattcattataataataagcaaaacttctatgcgcttattatttagttttccttataaattttctgcccattttaaaaagcagctatcagaattcttactttccgatagcactaattttttattaaaacagatgaacttgttattttttcggatattcctaaatatcttctgagaatatttgataaattggggctccttcacactgtgccgggtaacgtaaacctagtaatacagaaactgaaggcgcaacatccacttgccttataatacgttcagttgtaaatccattctttatcccagaacctgctgctacaaagattggtgatactgatgtatcaaaatatccttcggaagttgaaaggctgtctccatgaagtctattatatttttcttcaatagaaaagaatatatctccacattctggtccatgagtaccaattaaaacagcatctttatttctaaggcatatgcccacaactcttttaccagttttatcatctctgtaattatacaagtcagagattatttgttcttctaaatcatatttatctttaggatctacaataccatatttatcacggccttttagattaatataaatataattactacgaatctgaacagctcttgttttatcccaatctacttctcttgttgaattaccatctttatcttttttcaaaactgtatacccaagctcttccatgacttttgtatttaatccgccatattcacctaaaattggaggtacattttctccaaccataagcccatgatcacttacaagtaatacagtccatccttcatctaatagatgcaggaattcaccaatataatcgtctgtttgtatatagaatttttcaataaattcctgatatactttttcatcagtgtaatcccatggctcaagcgtcttagcaagatgccataattgatgtcctgcacaatcaatattatgaagatgagagaatactacatcatattttttctccttaatgcaataattaagacaatccgcctgccacttatcgtaaattgcccaggatggttcaaagatttctcttactagttcatcatcttctccaccgattaagctaacaggcggaacatgtccaacattctcggtaatatctttatataaagatttttgatgccataattgatcatttgagatatcaagagcattactaatccagactctaactttattgccttgtggatcaagttctaaaatcttcattgaacggcatgcaggctttgtcacttctttttttgtaacatcgtctattatccctgttaccatcttatctttctctaaaatgacgattggttcatctgctttcttatttttataaattgctactttatcatattcaccagcttcatttttaagaattaaggctggacgcctagttacaccacttgaagttattatagtgaattcttttgctccttctggcgcgtttttccaaccttttgcatctttaagtggagaatttataatatcataagccactttacttccaataacaatttccgtatcattatcatccataacataagtacgtatttcaccgccttgacgggctgtatctccccaccaaagttccatcatttcgtcatcaacttcatcgtctaaagtgccttctaaatctgtaattatgcaaccaacacctgctggcttttcgactcttggtgcataacgaacctcttcgatttcaggcgaagcaacaataactttttcccaatcaagttgtgcaactcccatattaacagatcctggctgagttccatcaacaacacttaagttttcactatgagaagttggcggccaagaactgcctggccaatgccaaactaatgtttttaaatcagcttctgatgtgatattccaaatctgttcagcagtgcagttacgcgaatccatattataaacaactgcatcaagactttcaggggattgtctccaataacaagtaattccatgtgttcctggataagcacctgtagcaagtgttgtccaacaaggcggtgtaattgttggaattgcaccaatttgtcttaaatcatttctagctgaaccacgttcaatcagcttttttaaatttggcatttttccttcttttaaaaatttttgactcactcttggatccatgccatctacacccaaaaccaataatttttgagtaagtgctgctcttttcataatatttatctcccttcaacaattctgtcgttaatgtacctccaccaagagaacaatcaacaaaaaaatttctattactcttaatattgatacttatttttgtgaatagatcgtgcgctttctttgatatatcatataatttgttaaacttcattttctaaatcatttccctgaatcaattctattaatgaatctctaagctctccaaattcttctgaaactctgatttttttaaagctattatcatcatattgttgaagtggatttttaaaatcactcacaattcttcccggattagcattcattacaataatcctggttgataaaagaatcgcttcttccacatcatgagtaataaagaaaaagcatttattagtttctttccatatcttctttagatgtttttgcatagcttctctcgttaatgcatctaatgcactaaaaggttcatcaagcagaactacttttgagtctgccgctaatgttcttgcaattgctgcacgctgcttcatacctccagacaattgatgaggaagcagttttctagctttttctaaaccaactaagtcaacataatgatttacgatttctgctcgctcttttttaggaatctttttcatcttaagtccaaattcaatattcttttcaacacttaaccaaggaaagatgttaggctgctgaaaaacaactcctacatctggatttggcttagtgtgcggcgctccatttataagtacttgccctgagatatctgtattatatccagcgatagcatttaataatgaagttttcccacatccagatggcccaagaacacaaacgaaatcatcatcaaataatttaagctcaatgttatttaagacattcgaatactcttttccatttttatatattaaattaacattctttaattcaacagaacaatttgcttttctctcttctggtctatttatttcaactaacgattccatattatatctcctctattaattatataaatcgtttcttaccgccttcttgaaagtttcaatatctggtgaagtagtaactgctttttgagttaacaagaaatcacttgtatcctttaaaatttgtggtagtgtcccttgcttgtccgctgttcctatatattttgcctgctcagacttatctaaaacagaaatttgattcatagcttgctttgtatcctcagcgcttaatccaagttctgctgataatgtttttactacatcatctgattgagttttatatgacttagtagcttcatctaatatatcaatatatgccttaactacatctggatacttagctgcaaaatcattatttacaataccaaattcaccagtaacagctccgcctttagcaacatcttcagatgaaagtattacttttccaccatctgaaactagctttgattgtgctggctgccaaatataagctccatcaatttcccctctgctccatgccgctataatgtcttgtgcactcatatctaaaatagttacatcattttctgaaatattattttgtttcaatgcagcaagtaagctatagtgtgaagttgaaccaaatggagttgcaatctttttaccctttacatctgccattgaattgattccagatgtattttttgcaacaagtgcctcacttgaaccgattatatcatgtaaataataaattttataaggaaggtcattaacaattccagttgttcctggaggtgtaccaatggttgcaatatctatagatccactagccattgcagcatttacatcacgcccaacatcaaattgaacatacttaattgaaatccctgggaattttttttcaagtaacttttcaccttttgcaagaagttctccatttggagactgaaaatatcccaaacgtatttcttttggcagcgctgaatctgaagcttgagtattccctgttgtactagctgtttttgctcctgagcagcctgttattaaaataccaacggataaaatagctgacagaagtactgtatattttttaattttcataaataacactcctttaaatatctctatgtacctgcttgtacattgattgattttattaataatccactattactcaatataaagaactttctatttttttatttttctagccatggtgaagcttttctgatcaaaaatctcacgaaagaatctaatataattgctataattcccataattataactccaacatagacaatatcatttctaagatatttacttgcatctaataccatccagcctattcctgatacagctgcaaccatttctgctgcaactaaagttgcataagcaacaccaatagctgttctaagactagttaatatatccggtaaacatgatctgaaaataacactaataaaaagatttattccacttgcccctaatgatttagctccattaatcctatctagtggtaccttttgaacgctaaatataaccccaattaataaaggtgcaaatgcatttaaaaataataaaataatttttgattcatctccaattccaaaccaaagcacaattaatgtataatacgctagcggcggaagtggacgataaaattcaataaatggatctagaattgcccttacagtccttgagctacctgcaataagtcctaaaggcacaccaattattattgcaaaaaatatagcaatgaaaagtctctccatacttacagcaatatgagatactaggctttctcccttatagccttgttttactaattcaacaaatgcctgccatactttttgaggcgatggaagaaatacttgattaatcaatcctttacttgtggcaatttcccatacaataaagaaaatgattacagatgtaaaagaaatgccaatataaaaaatttcacctctttttcttttcactattctcgcagctgtgtcttgattattcatataggttaatttccctcccccatttctttttacatctattttttaaattcttatttttcatacacatcccccttctttacttttcctatagaattactatgatttaattttaaatatatcttactagaccatccaagtattgtcaataaaaaatactataaaacatatcaaaaaagtaagatttatttttctaaggaatatatggtaacttacaatatgtttatatattaatataaatcctgataatattacgctgttcagtaagttcaattattgaacaatgtaatactatcactgttcaatgttcaacgcaataagttcatgtatttttttcacatttatagtaaaataattgtgatatatatttacactaactaaataagtacgccctcaacagtacttatgaaaattatttttcactattggattccaaattacgttttatcataaaaacaaaaaatgcttgaagcctctattttgctctaagcactttataacttacttttttcacggtattaatatatgaaaatcttaaatttaagtatcatcctagttacttttcgaataactcattggcttttatttcttgatgacgatatcgacctcttttaatgttgattttttatattatataaccttttgcggacactactgaatacaagcaaggtaaaattcacacttatgttcccactttggcttttcattaattatgataaaaattacataaaaacaatagcaatatcaaatagagacagcactgtacaactaccttgctctctctatttcttaatttttattataaaaaatctattactctaattacatctaatactatttatgcaccttacagcagcttcttttgcatcttggcacccttcttgtgcaccttcttggtatccttgacaatatccttcttcacgccctgcttctacacctgcacaatatccatccttatatccttggttataagcatcttctaatgcaccagctgaaggataatttcttctacaacggcattgaacattttccccaagagttccattacaattacatcgtacattttctccaagagttccgttgcaattattattattattattacttacagctccaagagtattagaatttctatatcttcttctatgacatctgtatcccatttcttttcctccgtaaattatcaaatttataatcttttgattaaacttctaattatatactatgctaatttactatatttgttattgcttttacaatatatactctaataattgctcataaaatataaattccgcattttcataaatattaataaaagttcaacagtagttgcgtataaaaatttcaactttacgtatactatgaatgggtttattcttaaacttagcattcattctttgcccctttattggggcttttttaatatatacaaataatattaatactataaatttaatctatatataagttgtatgtaattctatgaagaaaatttttcactataataagcatatcgttatctttatgttaaaagataatgttgaccccgaagccactcgtgccagcaaattaatattctatgttatctttatataatttgtacaatctttaaataagcaatatagcatattaacacatttctcaatgcacaaatctatgtctttaatttcatcatcaaatttaatcttatggcatacatcatctgttataaaaaatgaataatggtagaataatctttcttcctcttcgctgttaaaaggtatagataaagctttgaaaatttctttgattttatcttttctctgctcatcatattctttcctcaaagcagctacatctttatctaagagtgttaatgcttccatttcatcatgaaaagttttagaacagtcgtgataatctaacatcatctttataaatactttaaatagtggttttactacttcagcattatcaaattccttatcagcattttctaaccaataatcatgacttggataatcaaaacttttgttaattctttcaattaccttaagataaatttccttcttatcttcaaaataggcatatacagaacctgtcgctacattggcttcattagatatatctgctgtcgtagtattataataacctttttcattaaatagtttataagctgcttctaaaattctataatatttttctaaagctcttttttgtgttggtattcttgtctttctttccatctttatcacctatttaaataataaaagataaaaaaataaaagtcaacaaaatatgaaattcatttcatgtattgacttttaattttttccagcatattatataaacatgaatttaatttcatattcatataataaaaattttggaggtcatcatgaataaaaaacaaaaagtattagcatctatttcactagcaatagcttgcttcctaacagtattagattcaaccatagttaatgtatctttgccttctatggctgattatttcaacacagatataacaggaatatcatgggtaagtaccgcttacttgattccattctcagctcttttaataaatttttctaaaatcgcagatatttttggacgaaagaaactatttataattggtcttatagtctttggtagttcatcaatgctttgcggactttccacttccctttccatgattataatttttagaataatacaagggataggtgcggcaattcttgctccattagccattcctttgggtatcgaattatttgataaagatgctatgtcaaaacttgctattgtaattggtatgacaatttctatagctgcagcttctggtcctgttgttggcggaatcttaaatgaagcctttggttttaaagcaatattctatgtaaatgttccttttataatcgtctctttaatctttggggctcaatgtcttacagaatgttatgatagaacaattgaaaagcaaatagattttattggctctatattattagcttacggaatcggagcactaacctttttccttgttaaaggaagtacttatggctgggggagtacaaaaatagttactttaataataacttcagcaatttcaattattgctttcctaatatatgaattaagatcaaaaaatccaatgatagaatttaaattgtttaaaataagaagctttacttcttcaataataatagttggagtaatattctttgcttatatgcctatatcttatttaatgaatttctatctagaaaaccaattaggttattctgttttaaaatctggacttattttaggtatagtaagtggtgtttcatttcttacctctccaatatttgcaattatatctaagaaatatggtgctagagttatttcattattagcaataatttttgtatctttaggtgatcttatgtttgtatttatgaatagttcaaacaatatgaatataatttatagtgcattcattgtagtaggactcggtgttgcttcaacctctccattatataaaagtgcatttgacgaggtttcaaaagataagaatggtatggcttcaggaatattgaacagctttaggcaactaactgcatgtttagctatagccttagtttcaacattaagcagctattacactactcaagctatagaaaattcaaaaagcagaataatcgaacttgttaataacaatacagttcttgaagattaagtaaaatctgcgatagttgataaaataaatactgcagataccagcaaaaatacttccttttcgaaagatatggttgataaattaattaaagataaagaggatactgtgttagcttctgttcctgataaaatgaagccatctatagaagagaactttaatactcaaacaaaagagatctataaggtcttagatgacatgactgtcataaaaaatgatgaaagcaataaagtttataataaatgcttcctactcacagcaattattgcaattttaggattagcagcagtaccttttaataaaatgaaagaaactgaacttggaaaaaccaaaccagaatttgtagtatgaatatttcaaaacaatcattgaaatgacattaacattttcagtaaaataattcttatcctattataatatagatgttctatttctcaatataatatttatttttcagcattctgttgataattatgatgcttaatttcaattacagtaaataagcccaagacagttcgatatgtcttgggcttattttttaccatagctattgactatagatgcattactatctatagtcaattcttcattctagctaaaatgatatgcactcatttaaattatttttacataataaatttattattcactttttatctattaaccattaaatcataataaatataactttaatttataaatcgaaatatttactccataaatttcggttaaattgttactccaaactgtgtcgaatgagtaactataaattccgctcctcccattcccatagcaaagaacactaaaataataactaatattattgcactaaaatcatattgcattttttcttgattatttattatataagctgcgataatctctattccaacacttactaaaataagtggccacattgatacaattaaaagaacattgagattagttataaacaatcttagtaaaaacattatcccaaatataactaaagcaagtcctgaggttaatgtgcctaccttacgccccttaatcatctatctcactctccatttttttccctttgataagttttataccaagtgtaactattgctactcctatgattactttaggaatgtccctcattaaatcataaataataaagcggcgtagttcgtatggaatatatggttctaaaatactcattatattttctataactaaatatacacctaaaaataagcatataacacctactgtaagtctacgtttctcaaatatatctttgtctaattttgctagcttatcaatagaaaacaagtacttatcctctaaaagtaagagttcgtcgtcattcaaattcattctattagtacaatcaaagaaagaataaaaccaaataagtggcgctatatataatagcggtcctatgttaagccaagaagaaagaaagattaaaaagaagaatacagacataaacgatactcctattttcataaatcccatatacatatgtcctgcgcctggcaacattgaaaaaacaaaagtcaaaaatctactttttctcttgatcattattaaaaacctccagtttaattattttttcagaaaagttattaagatttacattaaccgaatctacaatcctagaatccaatggtctaacatgatttgtcgctgtattaaccaaagaatttaatccatttgaaaaaaccaatactaatgccacactagctgcaactgcaactttaacacaataaaaatggaactgaatcttgctttgcctcttattttttattttaatttgtactttttcttgaaaacctaaaggagcttctgcaagttcatcttctttaaaactatcagcaaattcatcagcacacatttgacaatcactaatatgttctaatatatctatcatttcttcgtcgcccaaaatatcaaactttagcatagttaatgtttcttcagttaaatggccttctttatcaaataatccattattcacatgaactcctccttccataaatcctttaacattttttttgacctgtaaagttgcgtttccaaagttttaatattctgcccggtttcctttgctaaatgtgatagtttgacatctttgcaaaaataatttatagctacagttctatatggctcttttagcttgttgcataaaatttgtattctctctgtagtattctttttaactactgtttcctctggtgaatctcctctatactcaagatcttgatattcatcttctgacaagctaactgtttttcttgccttactcttaagataatccttacatttatttgcagcaattttagcaagccaagccttaaggttatcaccatcaaagccttcccaattttgatatgctgataaaaatgtttgctgagccaaatcttcagcatcaaaataattttttgtgaaggataaacaaatagtgataattaaccgttcatattgttttatgcaatttgagaattgttctttttcaatatctatcaccaccttaattaatccttacattaaatataacgattaataaataaaaaacacttcaacttttttaaaaattataaaaaatttattgatttaagttaattatctttgttttctcactataaagattcttattcttataaaccattttataagaataagaatcttaaagttaaaatgtcactatttatttctgctacagacttagcatttgttttttcagccaacaattttacaatagaaagtcctaatccagtactccttgaatttcttgatttatcagctgcataaaatttatcaaataataagattatactgccatttgaaaaaagcatataacgtattgtgagttccacatgaataaatttttttaaacaggacaacctaactctatgtgtatttcaaataatttactaactatggaggacaacaatgaagctttttaaaaatgcactatctcttataataatttcaatattactcttgcataacattgaaatctctgtatacgccagcccaaatgttaattctcaaaatcaagttaagattgcagtattcttaagcaattttagttcaccgtttatttctaattttaaaaaagatctagaggaagttgaaaaagaaaataaaaatagaatcctgtttacattctttgattcaaaaggtaatgaaactattcaaaatcaaaatattgatgagtcattcaatcaaaactttgatctttttgtggtagacttggttaactctagcacaaatttttcacaaagtgcccttagcaaaatattcagccgtaatattccgctaattgtaatactaattccaagtgacccaataataaattttattagaacttataatcgagctgttataataggtgcggacgatgcccaatctggttctcttcaaggaaaaattcttattgacacatggacttctaataaagaaaccctagatataaataaagataatgtaattcagtatattattctaaaaggacccattggcgatccatcaacacctttaagaagtaaatattctatccaaacaattaatgatgccggtataaaaacagaagaactattatcgtctacatgtaattggaataaggattgtgcaagagacgacatacaatcttcccttctaaatctatatagtaaagtggaggttataatttctaataatgacgctatggctattggcgctattgaagcacttcaaaaatatggttttaataaaggcggcaattcaagatgcattccagttgttggcgtagatgcaataccagaatctaggaaactaatagatcagggctttatgacaggtacagttattcaagatactcgtacttatgcagatgccatacattctgtaggactgaatttaatttctggtgctcatccacttagtcatacaaactacgaatttgatggaactggtactataatcaaattgacttttcaagaatatataaaaaaataataaatttctatttttataaactttattctataataatttcttataagtcatataaatgtttatactctcataaaatttattattaacattttcttaaatgcaaataggagaacttcctcccattcaggtttagttctcctatttgctcataatatgtcatcatctaaatttctacctgtttgtttctctaattgttttatggcatttttgcccccattttttgcaatctctaatagctctgaaagacttgatgaaatatccctacttgcaaaaacttctaataacattggcatattaactccagttatgacctccatatcttccttttctaatgcaatcatactagcagcattaaatggacttcccccaaagagatcaaccatgactaaaattccttctgtacaatttaattcttgtataagtttattgtatttatctaataaattttcaattccctctcctggcttaaacgtaacacatccaatattcttttgttctccataaatcatttctgccgatttaactaactctttagataaatctccatgagttcctacaattattcctatcatttaaattaccccttttaaagttttttcagttaatctttctatattaatgatataatatgacattatgttgtcaagttatatattatatatttatatgtgaggtgatattatgcaaattagcagattgtttcaaattatatatattctactcaaaagaaaatccataacagctagggagctatcagagcatttcgaagtatctgtcagaacaatttatagagatattgatgctctatgccaggctggaattcctatatattcaagtcaaggtaaaggaggcggtatttcattagtagataaattcatttttgataaatcactattttctgaagttgaacaggataaaattctacttgctctacagagcctttccgctgtaggatatgatgatattaatgacgtattatcaaaattgagcaatctttttcagaaaagtgatgttaattggattgaagttgatttttctaattggggtagtgaaagaaaacaaaaagagatcttcaatctaataaaagaatcaatactaaagcaaaaagtaatcaatttctcatattttagtgctgacggtatgaaaagtaataggtatgttgaaccttttaaattgttatttaaagataaagcctggtatctacaaggatattgtcttgaaagaacagcgtttagaacctttaagataactcgaatgaatgatattaatattacagatgaaagttgtatacatcaatatttacaagatcttatggatgattcaccatcagaaaaattcaatgaactaattcatcttaagctaaaagtttcatcagaaggtgcatatagagtatacgatgattttgatgaagaaaatataactgtgaataaagacggctcttactccatagacatttcgatgcctgaaggtgaatggatttataattatcttctttccttcgggacaatgttggagattatagagcctatagatatccgaaacgaaattattaaccgcttaggtaagatgataaataactataattctaaaacttgacataatgtagtcaagtttagtttattacaatagtaataaattaaatttaactgtataaggattacgtcattaaaatattttagtatattttaaattcaaattataataaaatatcaagttttttgatacagtagttacaaggagattatgaaatacttatgagtgaaccattaaaaaatatttatacgttagaatttttaaatgattttgcaaataaaatacacaatgtttatgcagaatttaataagagcgattttgttgcttcagttttagcttatccgtgggatgaattacctttaaaggctcgtattcatagaatagctgaaatattaggtaactaccttcctaatgattttgaaaatgccctaaatatcttattctctattaataagagttgcgtaggttttccatatctattctttccagattttgttgctacttatgggaatcaagagaagaactttgagctctctatggatgctttagaacgtttcactcaacagtcatcttcagagtttgcgattcgaccatttttattgagtgaccctcgaggtgtaatggaatatatgatgaaatggtcattatctcctaatgaacatgtgcgacgtctttcaagtgaaggctgtcgaccacgtcttccttggggaatagctcttccgatgtttaaagccgatccattacctgtttttaaagtgttagaaaatttgaaagaagacgactctctttatgttcgtaagagtgttgctaacaaccttaatgacatttcaaaagataatcctgacgctgttttagcgatagcggagaattggatatgtcataatcaaaatactgattggattttaaaacgcggctgccgtacccttattaaaagagctaatcccaaggcaatgtcactctttggttacactaactcttcagctgaaaatcccatatttagaaatgcctcaatctctgctcaacctaaccaacttaaaattggaggcagttgtgagttaaattattcactggatataggctggggttctccagtacatatccgcttggaatatggcattgattttataaaatcaaatggtaaatcatcacgtaaattattctttttatctgacaaaacattgttacctaatgcacatttacaaggtacgcgtatacatagctttgcagatcttactgtccgtaagcactatcctggcattcataaaattgttcttatagttaacggtatagaggccgcacagactaaattaaatattttaggaggcaaatatgattataaataacctactattgaaattaaaagagagagacatcaataatattaaacaaacactgtaaatgtattatcgcaatatatattgaattcaaatgatatccatattacatgaatatttttacgaagatttcatataatatagatgttttcatgatttaaactatccactttcagccccattattggggcttttttatttatcctgaaaattatttttaacttatagatatacttagattaagtataaactttttcttaaaacgtataatacatttataagtacacaggattggaggatttaaatgaaaatattaaaaaagatattagctataactgcaattaccataatatttagtacggtacttagaagcatctttctcaataatacagctattgcagaagattctaaacaaagaactactattagagttggcctgttttcggcagatcttaatgatgattaccttatatttctccgtaaaaattttgaagatatacaaaatcaacatccgaacgaagtcatctttacattttatgatgcgaaattcaatcaatcaacacaaaatgccgaacttgataccaaacttaatgaaggaattgatttaatattgctagatatggttaatgttaacgatataggagacttaattaataaaatatcaaaatatgaaattccagtaatagtttttaatagagaaccacttacaatggatgctataaaatcatataaaaaagccctatatgtaggtactgattcaaaacaagctggtactttacaaggtaaaattattactgatgcttggaataatcataaagatttaattgataaaaataaagataatgtattacaatacattatgcttattggtgaaagacttaataaaacatctatagatagatctgcatattctatttcaactatacagcaggctggaattaaaacagaggaacttgcgtcacctgttttaaattgggatagagaaacagcgcaaaatactgttgatgcattattcctaagacttggaagtaaggtggaagcaataatttcaaatgatgattctatggcaattggtgcaactaaagcattacaaaaatatggctataacactggaaataaatccaaagtaattcctattgttggagtagatggcgttcctgaagctaaagaattaatttcaaaaggctttatgttaggctctcctgttcaagatactagtgttatggctaacgctatttatacaataggttctaacttagttcatggaataaatcctattgaaggaacaccatacaaattagatgaatctggagctgctattcgtataccatacgaagaatatactggcccaatgtttcaataaaaaattagataataaaagcatataatttttataaatttattttattaactaataattattattgactaattcaattattatgtatataatagtcttaaagataacactctcatttttttctaattatgtcagctaaattttaaacacatagattattttaatcttaaaatatacacaaataataattttaagattcttagtcattaaaaagacattttagaaataaatttaaagagtacaagactgttgtaatgacaattaaacttggttatttagcagaaagcaaaactttatatccaaggtcttgcaaaaaaaatcatgaagaaatagtcaaataattataattaaatttaggaggtaataaaatgactgaattgaaacaagtgtataaatgtgaaatttgcggtaatattgtggaggttgttcataatgctggaggtacactagtatgttgtaatcagccaatgaagcttaaagctgaaaatactactgatggagcaacagaaaagcacgttcctgtaattgaaaaagttgaaggtggagttttagtaaaggtaggctctgtagaacatcctatgcttgataaccactatatagaatggattgaaattcatactgaaagtaacgtatataaaaaattcttaaaacctggtgaaaagcctgaggctttctttaaggtagatgaacctgttctttttgctagagaatattgcaacttacatggtttgtgggctgaaaaaaattcttaataaaaaactttttatttaaatgaatagaagtctgtagtcatttgattattacttacatatcttaatcaaatgactacagacttaatattttacttagaaaacttccacttcaacattaatacataaatccttctaagaaaataatatactttcatataatacaaagcagatccattcattattttttatatttttagttaatgtataaaaacaatgtgaacttcaaattaatgaaattcacattgtttttgagcttgtctttatttaggaggcattattgttgctatgcctttaagcacttgaacaccatcttgatttgtacatatagtacttaattttattctatttttatcttcaattctttctatcacttctacttcagccttaattgtatctcctatttttactggagccgtaaattttagttcttgtccaagataaattgaacctggacctggcaattgcattcctaatactgcagatactaagccagcagttaacattccatgagcaattctaccttgaaacattgttttttctgattcaacttgatttatatgagccggatttaaatctcctgttattccggcatataaatatacatcagtttctgtaatagtcttttgaaaagatgccttatctccaatctttaattcctttatagttaatcctttcactagtactcccccttctttgctatataattttcaaaatattatttgtaagtattttcaattctaattaaacaaaatgtaataagctttgtaatgctattaatgcaaatacagttcctgtctttatgcaagtgattacaaatatatctttatatgattgtttatgagttaaccctgcaattccaagtaaagttataactgcaccattatgaggtaatgtatccattccacctgaagccatagcagcaacacggtgaagtaattgtggatctattccaacactatttgcccaagttaaatattgttttccaaaagtatcaagtgctatactcattcctcctgaagcagaacctgtaactcctgaaagaacatttactgtaactgcctctgaaagtaatgggcttccatctgggttaatattagttaaagcatgagctatagattgaaatcctggtaaagttttgataacattaccgaatcctacttctgatgctgtgttcataactgctaaaagtgatccaattgcaccagcattaattgctgcagcaaagtttcctttcatacgttttgggttaattgacactgcaagagtaataccaattacaagtgcaatcataagagcccagttattcattgaacctacaacaccagcttccggtatgttgtatggagctttagttacccaagaaacgatatcccatttaggaaatacaactttttgaagaactagagtcactataagtaccgatgctaatggtaatgctgatataaatggattcggcaagctgctgtcttcaacaattacaggctcttgcttatggtttgttccatatccttctccttttgcctgagctttgcgtttgcaccattctaagtaggatacaccacaaactaaaaccataattgcacctagagttccaaatataggagctgcatataaatctgtattaaagaatttcattggtatagaattttgaatttgaggtgttcctggaagcgcgtccattgtgaatgtgaaagcaccaacagcaatagttgcaggaacaagtctctttggtatatctgcttctttaaatatagaagctgcaaatggataaacagcaaatgctacaacgaaaagacttactccaccataagttagtatagctgctgctagtattacagatagcatagctcgtttttttcctaatttatctactataaattttgctattgattttgctgcaccagattgctccataaccttaccaaatactgcacccagtaagaagaatggaaagtaaacttttacatagttacccaagttaggtaagaatatttccgtataagttggcataatcgccattcctgaaaatatagctgccataatcgcaaatataggtgcgaaaacaataactgaaaaccccttataggccataaacattaaaagtgctaagcttaataaaattcctataactgccatatacaaaacctccgttattttattatttttcttttcaaatattttatccgtatcctattcacttatattagttgttacttcaacttcataggcttatctttaaaaattctttcatccattgtctttaaattatttgatattattggcttaaagtccatttgatcaataatatccttttgtaaatctacccctggagctatttcttctaatgttactccatcttttgttaatctgaaaactgccctttcagttatatataatactggttgattcacatctctagcgtaatctccactgaatgtgatttgttcaacattcttaataaacttctttgatcttccctcattttcgattactagcttgccatcagcaacattaattttaagtcctcctgctgtaaatgtgccacagaatataaccttttttgaattttgagttatatttataaatcctccacatccagctatcttaggaccaaatttacttacatttatattgcctttttcatcgcattgagctagtcccaaaaatgctacatctaaccctccgccatcataaaaatcaaattgagatgactgatctataatgctatctgggtttatagctgcaccaaagctcaatcctcctgctgggattccaccaattgggccagattcaatagttaatctcattgtatctcctattccttcttcattggcaaccattgaaattccctccggcatacctataccaagattagttactgcatttggtataagttccattgcacaacgccttgctattatttttctctcatccattgaaagacattcgatagaatctactggcattcttatttctccactataggctggattaaatgcttcagcaaatgtctgcatatggtcttcactgttagctacaactatagcatctacaagtattccagggatttttacaagctttggatctaaagttcccttagagactattttctcaacctgaagaattacttttccaccagaattttttgctgcctgtgccatagctaaaccatctagtgttgctgcttccttttgaagagttgcatttccatcttcatctgcatatgttgctcttaatatagatacatctataggaaatgctttgtagtagagatattccttattatcaatttcaataacctttacaatatcctctgttgtacattcatttaattttcctccctcaactcttggatctacgaaagtctttaaaccaacatgagtaattgtacctggtttacctgccgcaatatctctataaagactagatattactccttgtggaagattataagcctttattttattttcaattgcgagtttttggatcttaggagctaatccccaatgtccacctattacctttgaaagaaggccttcttgtcctaaatgattcaaacctttttctttaccatctccttgtcccgctgcataaacaagagttaaattattaggggcaccttgttctaagtatatttccttaagtttcttagaaaccccttctgcatgcccagcacctataaatccaccaaatgcaactgtgtctccacttttgattaaggcgattgcttgttctaccgacattatcttgttcatctttactcctccttttcacacttttatatactccataaagcaagagtgtaatattttatttataattccttttacacttatttatataagcaatatccgtgccaagatttcgagcatgtattcaacgtaaaactgcgcttttctataagtaatttcataaaaaattcttaataatagaaagtttttgttcgttattccgtacaatttcttaagtaaacatttacattatgtgcgattttccgtacaattatttttcataaaaaacatagttgttcgtaagaacgaacaactatgtctgtattttatatttttctattttctcatataaactagtacgccctatatcaagaatttttgccgccttacttttattaccatccgcagccctaagggcaagaataatagcatttttttcactttccgcgagaatatcttgaagcttcttaggaaccattgaaacctttttccccgtgatctctttcggtaaatctttcacttgaataatctcactattctccataatgtttatagcccgctctaatatattttctaattctcttacattacccttccattcataaattttaagatattgttcagcctccttagagattcctttaaccttcttatctaaatcaactgaaagcttttttattaaatgattagaaataagtattatatcatttcccctttctcttaaaggtggaatttcaattgtcacgacattaagtctataatataaatcttcacgaaacttaccttcttcaactaatctttcaagatttctatttgttgcagcaattattctaatattaatctttttactagctacgccaccaactttttcaacttctctttcttgaataactcttaatagctttacctgcatatggagaggcatatctccaatctcatctagaaatatagtaccttcatttgcaatctcgaattttcctatcttaccttcttttttggcacctgtaaaagctcctgcttcgtagccaaataattctgattcaagtaaatcacttggaattgctgcacaattaactttaacaaatggcccttcatgtctattactttccgaatgtattgcatgtgcaaagatttctttacctgtcccgctttcccctaaaattagaacatttgaatttgtatgagctgctttttcaactatggctttagccataacaataggttcactctcacctataatattttcaagcgaataatttgctttattgaattctctaaaccttgatttataagtagctaattccttttctataacgcttattcgtttataaaggctatttaattctttcacatttctaaataagaccttacccactaccccaataatttctccattttttactattggtattcttgaggctatcatatagcttccttttatcttatgaagttgtgctacttcttcttttccagtttctaatactattggcattctagtattttctatcacttcatttacatgcctgccgatagcatcctccctcttaatccctaaaaattctgtataggcattactgatcatagtaactataccctgcttatcaatgataatcattccatcataagcagtttcaattacagtatttagtatttctttgctatccctctcttcctcaagcttatgaattaactgactataatttgttacattactaaaaatcagcattgatccttgtgtattagtattttctccaaaaggtatgatactcaaaatcaaattcaattcattaactactatcggccttttaatttcctcttttttagttgacagaaagtattctatatctggatctggcattatttcattaatattcttgcctaaaccacctttgctatctatatcaaaaagaatactagctgcttcattaataaaaagtattttatcgttactatcaactacaattattgcattaaacatattatctaatattacttcaagcttactaatataatttttgaataatggtttgttgctcatgtaacaccttctctcttaaatcttatttttaagtattttactaaagattccaagtaaatacaagggataaagtaactatcttggaatatggtattcagctttatattcccatttataagccttccacatatacttttattaaatacaaataaaacttttaaaaatatagatattcccccttaaaactatatttatgtgctaacttatcaaaatcataaatattttgattccgaaaaactataaaaattcaacctaaaactcctaatatttgcaacgcattgtacttagatcatgagacacttaaattaaatataaatattttataagcatttagaaaggactgatagaaataaaaagattaatttcatcttattattcatctaatacagctaaatatagaatagtaggatatatacacggtgccaccactaatgtaaatcctaacaaattaactcatattaattatgcttttggaagtattataaacagttcaatttttattcctgatgatcaaaatttaatgaatttagtatcattaaaatctcaaaatccgaaattaatggtcatcctttcaataggtgggtggggggctgaaggcttttccgatgcagcatatttagagtcatcacgaagtagttttgcaaatagctgcctggatattgtaaataaatatggtatagatggaatagacattgattgggaatatcctgttagcggctcttgtaacctaattaaatgtactcctaaagataaagaaaatttcacgcttttacttaaatctatacgtaacaaaattggaacgaataaaatactcagtattgcagctggatcagataaattttacattaataatgttgaaattaatgaaatagtaaatatctgcgattatataaatttaatgacttatgactttggttataatgctcataatgcaaatctttatccaacttcttccccctatggatcaggttttagctgtgatgaatcagtaaatatatttttgcaggcaggtgttccagctatgaaaattaatttaggcattcctttttatggttatcatggtcatgaatatctttcatatggaaatctacttgaaaattatataaataaaaatggttggactagatactgggattatgaagcaaaagctgcttatttaaaaaattatgattcatttattacttatgaggatgaagaatcaattgactataaagttaaatatataaaatcaaaaggcctcggtggcgcaatgttttgggaatataatcaagattacaatgatattcttctaaataaattatggacaggtttaaacgaataatattacatgcataaaaaataaaaataggatgtaacttaattcatcctattcttataaatatatatatcttttaaaataccattttattgaatttaatttttgaaatactaatttaattaatttagtcattatcattttaaacactatctaataaagttagtaaatattttctcttcacctttactttcttctacattagctttcccagaatcagcaagttttaatagccatgccatgttctttcctaaaactctcattatctgcattccttcttcatcctgaactgcttctcctggtgctgtaccgtgaactacgttccaatagtttgatgttggcattaacatctcagaataattaagataattatttaactgagtaaatgttggaactccaccagaccttctaactgcgacaacacttgcacctactttgtgtctaagcatgccattatttacagatgtaacataaaacgcacgatctaaaaatgatttcatagttcctgctatagcagaataatgcactggagagcctagaatgattccatcagcatctttcatcttttgaatccaatcgttaacttcatcattctgcataacacacttttcgttcatatttctggcacatccgccacaagccatacatccacgtataaccttatttccaacatgaactatttctacatctatattctctttctttaattcttctgctacagcttttattgcctcataagtatttccattctttttaggacttccattaaaagcaactactttcataatacatacctccataatattaaaatcatgatgtgattatataactcagtaatgtaagtaacaagtacgcactttttagttagacaacttactttttggtaagaattattgaatagcctacatgtaaggccataataaatttttcataaaacaataatgtccttattataattcgcaatatataacttatctaatagtcatggtaaaataaccattatcttatacaatcttctaaattagtactaacatatattttacattttgcttaattgatttgatattatcagacaggttgtttatactaatatctagtaacatttataaatatttaaaaatgaaagcgggtaactaaatggtaaattataacggaagaagttatgtgtgtttattggattttgcaatggattttataagaggaaaatggaaggcagttctattatgtcatttatataatgaaccaaaaagattcctagaacttcaacgaatgactgaaggaataagtcaaaaagtgttaaatgaaaaacttaaagaattagaaaatgatgaacttgtatgcaaaaaggtctatgcagaaattccacccaaagttgaatactctcttactgataaaggaaaagagcttactagtattattaaggaaattgagtcttggtcggttaaacactaccctgaattagataataaatgtgtttaattctattacttttctataattaaaataaagaagaaccttctcctttatagctgattcttctttattctttaaatgcatcaatcttgtctttttactaattattttattgcataatttatttcaatgcccttcctctgtctcatctactattatacttttttatgtctttaaatatgttactacttgttagtattatagctatagcatttctaaatatttattattgatttcatggctaccatcactcataataatttaaccatattaatattattataaaaaattatttaactcaccttaaatttcaagatatcttataaccatatttggttatatttttagttttttctgcatttttctttattttctctcaattttttaattttaatttcgattattataaatatatagattctacataatataattcattttacatcgtgttatttgctttgcaatagctggtagtttaaactaaatttctatgaattaaaatcaaggagtatgtagacttttaattataacttttctcaaatataaactatttatattgaacttttattggaggtgagaaaataaaaaactttcgcataaaaaaataaagaggggttgatttaatgatttggtttaaaaatttaaaaatatcgcataaacttatttccacttttacttttatttcaattttagtatgtattgttggttttattggattatataatatgaatataattaataacaatgcaacttccatgcatgattataacttggcctcaataaataacttaactactttaaagcaaaatatttctgatatacgttcagatttgctaaaacttgcttatcaaagaaatgtaagcgaaaaagatacagtaaaaaaagacattaaagacttaattgacgagaataatgaccttataaaaatatatgaaagcactttaatctctgaatctgagaaacctgcattctcaaaccttaaagaaaactttaataaatatgttgatttatctaactcaataataaaatacgtagatgagaataattttagtgaagctgatgaaaattattctaaagttaccgaaaccagaaaaaatatatatttgagcatggatgaattaataaaaaataatgttaaccaagccgatgcttcttattctgaaaacaactcaacttttaaaagatctttatacataacaatctcaataatacttattagtttactactagctgttattttaggtttatcaatttcatttatgatttcaaaacaagtaaaaagagttttaatctttgctgaagctcttggtagtggtgatttaactaaaactataactgttgactctaaagatgaaataggtgatctttcaatggcattaaacaatgcaaaagaaaatatacagaatttaattgttgaaataatgaatagttcaagcgatataagcgccacaagcgaagaactttctgctactactgaagaaattgcttctaaaatggaaattgttaatgaatccacagaacatatatctaaaggtgttcaagatttaagcgctaccacagaagaagtaactgcatcaacagaagaaataagtagcgccataaattccatcgcaaaagatgcagaaaattcattagtatcagtaaatgaaataaaagaacgtgcttataatattagaaatagatcttcaaaaagtattgaagaaagtaatttaatttatgataaaaatcgtttaaacattttagaatcaattgaaaattctaaaattgtatcagaagttagaataatggcaaattctattggaaatatagcagagcagacaaatttattagctctaaatgctgctattgaagccgctagagctggtgaacacggaaaaggttttgcagtagttgctgacgaagttagaaaacttgctgaacaatcttccaatgcagtttataatattcaaaccatggtatcacaagttgaagcttctgtagaaagtttatcaaaaagcggacaagatgttcttgaatttatggctgacaatgttaaacccaattatgaactcctcatgaatacaggaattcaatatgaaaaggattctgaatttataagtaatattatagataaatctgcctcttcttcaaaacaaatggatgaagttataatgcagataagtggtgcaatacaaaatgtatcttcagtagctcaagaatctgcctcaaatacagaagaaatattaaatagcattactgaagttacctttgctctttcagatgttacaaaatctgctcaaagccaagctgaactttcacaaaaacttaatgaaatgattcaaagatttaagatataatacaaaatcaaaataatttatgaaaatttaaaattatctttgcaaatctcatataaaatgtaaaatagcctttacaaattttatttgataatataataaattatcaaataaaattggcataggctatttcttttttagagtttaataactttaagataaagactgaaagttttattatgcctcagcttatctctaagtaatggtattcttttaattcacacaaaaactataatatatcctgctagcattaaaactggtgttaataactttccagaatatattaattccgaattaggactagtagcttaaggttttcctatttagtgccaagcctagtttcattaatttctatactgtattctaaatctgcatatgcttttatcgaaaaaccatctaccttacctgtatatggactaataaatatctccacttttttagaagaatcattttcatcttgataaaaaagacgatgtccattttcgcctgctacaagtatacatttaggtttttctatatcccctagcttatgttgcttaataaaatcttcagctgtatcttttaattgttcttgagaaattgttaacttaggtttggattcatcaagatatccttcactaatcaatacataatctatttcctttgtattttcattaaaatcaaacatataacatttatcttcattaattccaacccatcctgcttgaaccattccgtgctttaattttgctaccctatccttaagtccattatcattttcttcaacaaaagccatttccttatcatattcttccttagatatctctttcttatcatatgaattttgtatatctttctgttctagcggctttattgcatccaaagttttttcatttaatatacatgcactaaacttaaaatcatcattttcttcaactgatgatatgttaaaataatcttttaaaatatctaaggatttctgcctataagcttccttctcatcaccagttatttttcctgtaccatcatcttgagaaaccgatgaagtatcctctttagtgtagacaacattttgttttatagtatctgcaaaagctcctttcatattaatttgattaaatatagcaaaagtagatgctactactcctactgttaacaatactgctactatttttttagaatgcacaataatccctccataatacattattctaattgtgcgtaagtacttactccactctttaagtataaaatttgaatgtcccaaaagtttattatagttgtgaaatagttgtaaatttatatatgtttaaccagtaaactcaatcaacattattaaactctctatttctatttactctactttcttctttaaactatctaaaactattttttaagatatgcatataagttaagttcgttctttttaattaacaagcttatcatttatttcagtactagaattattaaaaattaaagtaacctctgttcctatacctaaatcactacttattttaatatctgcgctgtgaacctctgctatctttttacatatagaaagtccaattcctgctccattattttttctacttctagctttatcaactacataaaatggctgccagagtttatctaaatgttctttagctattcccaaacctaaatctactacagatatgtaagttttattctgaataatgcatatttttatatatattttagaattatttttagatgcttttatagcattttcaactagattagataatgccatagtaattagatccttgtctatatctagtacgcaatcctctccttcaataattaaatctatatttttgtccttaagtctagcgaattgcaatcttttaacctcatctattacattaaatattctttcagtaatcaattcgatttcttgagtctttgcataaattaaatccatcattttaaaagccattttttcaagtctttttccttctttatatatataatctgaagcttcaacaaacacctcttcattatattttgatgttctaatcaaatttgcatatccaattattgaagttaaaggtgtcttgagttcatgggtaagattatttataaaggtttctttctcaatattagatgtttcaagttcgtttattttctcttctattgtctgtgccatcagattaaaattacttgagagcatgctaaattcatctcttgatttaattttcaccctttctgaatactgaccaagagatattttctgagttgaagctattaatgtatttatcggttttgttattaatttgcttataaaaaacataaatatagcaaaaagagaacagattaaaatatctaatttcataaaaagagcatattgatttattttttcagaatatatatttgaaatgtctttcgcatagtgtacttttattggatagtcatatacattaactaagctactagcgtacaaatactgtttaccatctacagtcctaataatatagttagtttttccttgcgaaagattttctagttcatccttttcatttgaaagaggaaatttcatgtctgaaaatagtatattattcctagaatctaagatttctacatctccatgctgttctgttccactattagcagccctattatattcatccattaaggtaccaatcaatatatttatgtcataggtattatttgaatagattttcttcatatatctagaattaacgcttaattgtgaagttgcaaatttttgttctgcaaggcatttatcaacttctttttctaacagatcattatgaagtttttgtatcaatataaatccggctatgtttaaagtgaatacaagtaatagcaacgaaaaaagatatattttaagccataacttcatgtatttcactcctctaacctatatccaattttatatacagtttttatgttctccgcaatatcaagcttttttcttattttttgtatatgagtatctattgttctggtttcccccatatactcatatccccaaattttttctaataaatactccctagataatgccatatttttatttttcacaagcaaaagtatgagctcaaattcctttaaggtaagatcaattgtctcatctccattttttataattctttcgtcttcatatatttttagtcttttaaattctatacagttattattttttgaatatcttcttagtactatttcaattcttgctaataattcaactgtttcaaatggtttaacaatataatcttctgcaccagattttaagccagttattttatcagcaagtccatttttagcagtcagaaatattactggtacatttaaactttttatcctcttcattaattcaaatccgtctatacctggcagcataatatccataaggataagatcaaaagactcttgtttaattaagttaaaagcctccattccatcaaatgtctgcttgcattggtagccagccattcctaggcttatccgtattaaattagatatagcttcatcatcttctacaattaaaatatttatcttcaattatgtatttccccctaataactaacttgatattttaaagtaaattcttcaatttaactttcatctccattatataacataacttccaataaaattgcaaaatagttgtaaaataaatttggacctgacttcatatacgcgctcaagatagctaaatcatgcttactccatagtaggcccaagcacctaaacttttcacaatgtttaaaatatttaaataagcttattttatcccttaaaattttatgctatattggcgcactaaaaaatacttagagttcgtatttctctaagtattttctatttgtataattaatctaactaacttcatactttatcttcttaagttatacccgtgggtgtcttaaaagtgatccattatttatattaaagagattttacataaatattttttgaaagatcctttagtttttgcagatctagtatatttatcttcttattttcgcactttatgattccctgtgattccaattctttaagagttctatttaaatgcctgtaagttgttcccagaaattcagcaatctctaaataagacgaatttaaaattatgtaactttcatccattatatgttctactaaataactagctaatctattattaagtggatacacaaaattatacgagctattattaatagttgcataaagtttttcactcaaggaatctactaaatgatgcaaaaattttgtattatcaaaatagttcttccttaatatatctgatggaattcctatcaaataagtatcttctactgcattaatattgcaaagtataggaatgttttttaaaagttctaaatctcctatagtattaaaatctctataaaattttaatagcattgatttaccattttcaaaaggataaaatactttaattttcccatctacaattagataataatattcaagtttttcttctgatttcattatatattcttctttttcatagaaatgaagctgaaaatgttttagtatcgtgtcatcaaatatgctttgtatgttatgctttttaatataataatttaaaagtttattatctaaaatttttttcatagactctcctaacatgacttatgtcattttcaaattcctataaatatattattttattaacagaacattgtaaataaaatttaattttgatttttacaaattcatatacaactatacggaggacatattatgaactatgaagttatactatttgatgcagacgatactttgtttgatttcaaaaaatctgaaagggaggctttcaaaaacactatacttgaatttaatatcaattacgatgaaaattaccacttaaaaatatatcatgatataaatacgactatatggaaagagtttgaacaaggcttaattactcaggaaaaacttaaggtagaaagatttaaaaggctggctgataaacttaaaatttcttttaatgagatggaatttgctaaatcatatatgcaaaacttatctaactgctcctttctatttgatggcagcctagagcttatagagaatttgagtaaaaactataaactcttaataattactaatggtctcacagctgtacaagaaaatagaattagaaagtcaattatatcaaaacattttgaagatgtagtgatatctgaggaaatctccatttcaaaacctaatcctaaaatatttgaacatgctttagaaaatatacatcacactaacaaaaacactgtacttatggttggagatagcttaacttccgatatacagggcggaataaatttcggtatagatacctgttggtataatccaaataaacttgagaataattcaaatataacccctaagcatgaaatttctaactttgaagcgcttaatcatttactccttaattcttagaatttactagtagatttttaggatatgcttaatctttatgcacatatgaaacttaggattaggtcactacgacctaatcctaaatattacaattcattctttataaataaatctaaagcaaaatgacaccaaactttcattatcggaaattctgtaattttctttaaaataaagaagactaacagaataattcaacttgaatctgttagtcttccagatctaaaatattatattaaatattgttattttccttaattattacttgttgcattgttttcagatgattgatttactcgattatttgctgtgttttgactatctgaaatatttttattgtctattccagtactatttatattttgaccagtagttaagtattttgagaatataaatgttaaagtggtaaaatcatattttttatcgtcaatgataattgaatcttgtactaattttccacttccatcaaagtaataccacattccattattcctcaaccatgaatttgatgccataactccatttgtccagaaataataccagcttccattatacttcatccattgagttgtcatagaaccatcttcctgaaaataataccaatctccatcgatttgtttccatccttttgattttatgccattctctacccagtacgaatgtttatatttatcttgcttccaagtcgcagaagctgctactggaataattcctatcactgatatagccagtaatgatgatattattaacctttttaccattttatcgtcccctatccattcaattaataatattattatatcatattaatattacattttattctaattttttgcaattataatcaattcttactttagtgttttataacttccatattaaaaatataactacataaaaaccacttattatatatataaaaaaattttttctactattgacgccttgtaccatgtcgtagtaaaattaaggcggaaaacaaaagctaaataaaaactttgttaggtgaggctcctatatagatacatgctgctgcccggaaacgtcgagagacgccaatgggtcaacaggtattgccggattaaggttctacttaatgtagccgaaaaccatatggttttctatgctctatagtgctaaaactcaacgagtgaaggttaatacaacaaatgtactttgcgctactgcattccgtatatttgtataatgttgtgtttgattattgtgcccttcacttatagtgaagggcttttattattttttaaaggaggtgtatccagtggatgaccatgatacggaaagttgtaatatacatttttatttaaattcaagcaataatatttttagggcattaattggatactctctttatgccctgaattgaaagggtgaaaaacatggaaaaaataacaaatttctttgtaagtaaaattattcataaagaaattcataatatttctggccaaataattggcaaactaaatgaccttattcttgattttagtcaagaaaaaccaactgtagtatatatacaaattacaaattggaaaaaatctttttatctatctgctgatgcgctagatatattcaaagatgaaaaagaaaagtatcatattaaaattaatagcgagagccttacaataaagtttcctggtgaagatgatatttttttagtaagagatttcttagataaacaaatagtagacataaacggcaaaaaagtagaacgtgtaaatgatgtacgacttggaaatataaattccaaatggcagcttgttgccgttgatataggaactagaggattactcaggcgtcttggtgtagaatatccttttataatattaacagaagctttaaagtatagattaagaaacaagttaattatatgggatgatgtgcaaactttgtctactggggttaacaatctacaacttcaaatgccagcaagcaaaattgaaactctacacgcagcagatttagcagatataatcgaagatcttgataccaaaagcagagatatattgtttcacagcttaaacaatcaaaaagctgctgaagttctcgaggaaatcgaaactgatgttcaagtaaatttattaaaatctatgtctgatgaaaaagcttctgatatacttgagattatgccttctgatgaaatagctgatattttagaagagatggatgaagatagagttgaaaaactattaacacacatggacgaagaaagtcaggatgaaattagagagcttatggaatacgaaaaagaaactgtaggaagtattatgtcaaaagattttctaaccttcttacctgatgtaactgtaagtgatgtatttaagtggattcaaggaaatgcgcctgatgaagatgaaagttattatatatatataacaaatgataaagataatcttattggggttacttctttattctcacttattacttcaaaaccagatacaaaactttataatataatgacaactagacctgaaagtttaagggatacggatgaaatagaagatgctataagcttaatgcataagtataatcttgtttcaattcctgttattgatgaagataataatttagttggtgtagtatcattaaatgacagtatccatgaacattcacgcttaaggagggttgcactatgaagaaagtattatccggtagatttaaaaagctacttttcattatgactattattggcccaggattaattactgttaatgcaggaaatgatgctggtgggattacaacttatgcatctgttggtgcgtcttatggatataaaatgctatggggattacttttaatcactttcagtcttgcagttatacaggagatgaatgcaagaatggcggtggtaactggtaaaggtttgtctgatttaattagagaaaaattcggagttaagcttactttctttgcaatgaccattttactagttgccaatatgggtgttgtttttggtgattttgcaggaattgcagcaagcttagaattatttgatgtaagcaaatatatatctatccctattgtttctgtagtaatctggttacttgttaccaaaggttcatataaaaaagtagaaaatatcttcctattgtttactcttgtattttttacttatattatatcagcttttttaactaaacctgattggggacacgtaatgaaatcaatgatgacgcctaccattgaattaaatacaggttttcttcttacctttataggaatgattggtacaacaattacaccttatatgcagttttacctccaatcatcaatagtagataaaaaaatcagtatatctgagtataaatacgaaaaacttgatgtttatttaggcgctttctgggggaatgcagtagcatttttcataattgtatgtacagccgtaacactttataaagctggaataacaataactagtgcagaagaggctgcaatttctttaaaaccacttgctggtgaagctgcatttatactttttggtgctggactttttggtgcttcagttcttgctactgctgtcatcccactttctacgtcctatgcgatatgtgaagcttttggctgggaaagtggtgtggataatgattacaaggacgctccagctttctttggaatatatactggtataattgttcttggagcattatttatacttcttcctggaatatcgcttattcaaattatacttgtatcacagcaaattgctggtttgctatctcctataatattaacatttatgataattttaattaatgataagcgtataatgggtgaatacgttaataataagactcaaaatattgtttcttgggctacagttatatttattataattctatcaataattttatttgtatcgcctcttatttcataattatataaatctgcacaaattcttatgaaataaaatatatattatactttttattatttatagatctttataagtaaaatggaacaatgtatgttttaaataacatacattgttccattttattaattaccataagtattgcttatcttcctttgtatacttaactttatttattcgaaatatataatatctattctaaacttttattacattgaggtgttgcataaactatcagagaatgtaagttagatagtcttataactaataaattatacagaatttatacaattactcattaaatgaaatatattgactatatattttaactacaaaagttaagtctactttttctcattcctacatttaatacaattcctaatgacataaaatttacaagtatagagcttcccccatagctcataaatggaagagtaattcctgcaattggcataattccaatagtcataccaatgttctgaaaaattgaaaataagaaaccagatgcagttccaacacaaatgagacgtccaataatatcttttgattcttttgcatgcttaatcattttatatattaaaatactatataaagctatgagaaaaagagccccaaaaaatccccattcctctccaactgcagaaaatataaaatcagtatggacctcaggaatgaagccaccggatgcacgaactccttttaaaaatccagagccaattaacccaccagctccaatacctgttatagactgcattaattgaaaaccagcattctgctgatatgattctggatccaagaataccaatattctctgtctttgatatggttttaatatatcactagaccatataataagacttagtggaacaactgagaaaaagcctgcgacaagaacctttaagtttaatccagaaatgaagtatattcctaacgtaataaagaaacaaataagagtcattcctaaattaggttgaattacaattagaaacattggaattaaggcataaaaagataagataagaaagttttttggattgttaatatcgccatctagatcatctaacttttttgcaaggattagtattaatccaaactttacaaactcaccaggttctatagctctatttccaatccttatccatgatgatgcaccttttactgctttgcttgttatatcattaaataataaaagtcctactcctgcccaataaattagttttgcataaccacctatagtattataatcaaatactaaaataaaatatacaattgctagtccaataattagccacaacatttgcagttcagcataatagaatccaaactttatatgagttacactataaatgtttatgatcccaaagattgtaataaaaatagctgtcacaaacatagtaatatctaattgttttaaaagcttgctattaatcaaatatttattcatgtaaaatttcctcctgaaaagtcgaaacaattagtttatatgataattatgtattaataaatagtaatattcaaccatttgtgccaaatcttaattttaatttaatacttgatatttcaatatataatcaaatttttaacctaaattttcacatttaaattcccaattactatatgttgccaaactcatagatactctaagtatataagtatactaacactaataaatatacaccttaattctttgtaacatgcctactttcattatttcctattaaattttacatctaataatttcaaaattatggaacaatatgactattagatcattataataaataagacatagctattcctattatacttttatttatactcccttttatttcaaaaaactctagtagtactgctagagtttttgatttaaatttacgaaatacaaagtatttctatatatatttttcatctgaagaatatggttttgccatagattaaagtcataacttatcttaacaatatatttttaattcaacttttttaattatgataacaccttaaaatttcaacttaagtattttatagcataaacatttgtttacagttttaattctttagtgcttattctttattttaactcacctaacaagtcagaaaccgattccctttcaagtaaaataggttcaaatttaatattacatatgttgttagatgttaaattaccattgttatattcaatttgatcaaataataatttcgcgcattcttttcccatatcataagctggctgagcaatagtagtaatcgatggctgataaaaagatgcaaatgatacatcatctattccaatgactgacaattcatccggaatagaaatgccattttcttttacataaaccaataatttttcaagaatcatatcatttgatgcaattactgctgttggtttatcttttccatttagcaaactttgaatcatacctgaaattttatctagaggtccagattttataaaatttttatttaccgatattccatgacttctaagtgcattgcgatatcctttaatcctatcaacacgattacttatagaattattctgcacaggaaaagataaaatcccaatctttttatgaccattttctactagtaaatctacagcttttttgctagctaataagttatctaaaacaacagtactcgcattaatttcttttattcgtctatcaattaaaacaagaggataatttctcgaaacaatgttttgatataattcaatattatgacgtgttggaaaaacaattaatccatctacttgcctagatatcatagaatcaacacaatatttttctttctctggattatcatctgtattacaaatcaaaacctgaatacctttcttttgacaaacatcctcaactgccctaacaatttcaattgtaaatctagatctaatggttgaagcaacaatccctattacatttgtacgtttttgttttaaacttcttgccaattgattaggttgatagtctaactcttcaattgccatttcaatctttttcttagtatcatcgctcatatactcaaatctttcatttaaaaattgagaaactgtactttttgatacattagctctttcagctacctctttaattgttactttcatctattttccaccttacttaaactttatcttattacgaaacataaataattattttttaatctattctcatatgtattttgtaataataaatttacatttagaattttaataaattaaatgctaaaataaacctaataatgtaggaactcaattgcactacatatataaacaatttaaatttaacataaaataaaactgaaagctagataaaatctaactttcagttttaaattttatagataaacaatatatagctcagatttattttataacttactgaatttatacatattactattattcatacttttatttaattagtttgttatattctatggatttatctatataaatctggctataaaccaaagaattagtgaagtaactgtaaaatctgaatctgcaaatgttacatttcctgcattcatgcttgtaaaaataaacaatgtaactgctggcattacacagaggaataatccatctagaatgctacctattattgcaccacgaagacctccagttgcatttccatatatagcagcagcacctccagtaataaaacaagccattagccctggaacaataacaggtaatccaattatcggaaatattaatatacatacaactcctgtagccaaacttactaggaatcctataagtactgcattaggtgctttatcaaataaaactaacacatcaactgctggggtcgctcctggagcaaatacatcagcaaatcctttaaaggcaggtacaatctcttcagtaaataagtttacaccttgttttgcaataaacaatcctcccgctaacatagctgattgctttaggcaatatacaaagaaattaagacctcctgataattcatacacaaatcctgttccacctttgattccagcaattaaaaacagtgctaacattgttaaagttgttgctacaatagaatctctcaaaaatgatattgatttcggcatatttattgattcagtagacttttccttatttcctactagctttccaactaaagatgagataaaatatgcaatcattcctgaatgtcctactacatattcatctgtgccaacgatttcagcactagctttacgtaacgcaaatggagctatggacatatatattcctacaattatacttccaattataatcgttattatttgtgaataacctaatccattcataacagctgtaatagcacatgacatgaataacattagatgcagagataaatatataaacttaaattttgtgaaacgagctattataatgtttagaagcattgcaaacaataatatcaaagatgcttgtacacctaatgtatctaaagtgatcgatagtacagcttcattacttggaattatgcctgtaatattaaaagcatgtgtgaatatttttccaaatatagctaatgaatctccaattattgaaccgccaagcttaattaaaataaatcccatgaaagatttaatagtccctgtaattatctctggtatagattttctttgaaataataatcctaataaagtcactaacgcaataaccactgatggttcccttacaattcctataaacgttgtcatcataatatatatctcctttattttataaataatcaattttcaagacttatagcaagcatttctaagttttcgtaacattggcccataaaattttaataagtactctttcttaaaatgaaatccacaataaattaattcgtttacatacaattcattaacttatccatatttattagtttttaactttgcataccgttcatactaataaaaaaactttctccatatttcattcatatcctctcttcaaaactaatatataatatttttactaaaccggtttattaaatattatcatataatgatagcgattgcaataatcttataaaatatttttatcttctatatatattttaataatgaatctatattagcaacaatattagcataaatactagataatcattagaatgcatgaagtcaattgcaatgcatattctctatttttaaatacctatctacttcataaataaaatttttttataaatataatttgaaaatatataagaattatgatattattttagtaaatcgatttataaaggagaggcttttatgattattaaaaatgaaaatgcaattatacaacatccagacgataatacaacaagaaaaattctagctaatggagattctctattaggagcaagagttattttcgataagacaactacatcagttgttcctcacactcatcctcatgatcaatttacttacgttttgaaagggaagctaaaattcattatagatggtgaagaaactatagtagctactggagattctttattattcccttcaaatgttccacatggttgtattgttttagaagaaggttctgaagtactagatgtattcacaccgacaagggaagatttcttagaataatttgaccatataggatttctcgttaaaagtttgaaatatcctagtcagatgaattggatatatatttgtgaaattttcacagcaatatagaacaaatatgtatctaattttggctgatattcatatatgttcgattctcattgtgaaaacctagtgattattttatattaattaaacaaaatagctctccaattatacagtataacaactttataattggagagttattaaaatttataaagaaaattttaaatacctaataattttctttttctatagacttatacctagtctaaatgaaatacttctttcaattcaactgaaacaggactattgtcctcattagtttccatgatatccttcatatatttccaccatttttgacatatctctgtttctgaacttttattccacaactcttcatcttctatttccaaataagcaaataagctgcttgactcatgatctaagaaaatagaataatttttcgcaccatattcgcgcaacatatctacaccatctcaggccagatttcatcgtgacgtttcatatattcatcataaaaatctttaaatactttcatttttatgcctttacgaatcattttaatttctctctaatacctacagatacttattataatatccttttaatatactctgctatttcattacacttacagttatcaaagaaatattctttaaaatcagttccacttacagcaccttttaataaatcttgatctatattctttaagattgttaacatatctgtatgtgttacctttttaacttcatctagtatttttttatttctttgttctggtactactctatcctttggatatccttgaccactttcaccctcaaataatttttcaaagatgtattctaaatttaattcagctccccatccaaatcctttggcaaacggaagagaaattgcatttccatcatttatttgtgcaaacatgtacgcatcagatggatctactatatgaccgcataaaacacctgggaatgcattacatgcaagcattgcaccttcccctgttccgcatcctgtaactacataatctgctgctcctgagtttaataatattgcagctaaaataccattttgaacatatgttaattgcgcttcaccttctatgccatacattccatagttaaatacttcatgaccttttggctctacaacttttttaagtgattcacatataattgaattttttgctgcttgactgttttcatttattaatgctattttcatactatcgttcctttcctattgaggttgttttcctatataagctaagataccaccatctacatataaaatgtgaccattaacaaagtctgatgcatcagatgctaaaaatacagctggtcctgctaaatcttctgctgttccccaacgtgctgctggtgtctttgcaattataaattgatcaaatgggtgttttgaaccatctggttgaacttctctaagtggtgctgtttgtggtgtagctatatatccaggccctataccattacattggatattatattctccatattcagaagcaatgttctttgttaacatctttaatccaccttttgctgctgcatatgctgaaactgtctctctacctaactcactcatcattgaacaaatgtttattatctttccgtgacctttttttatcattcctggtattactgctttagacacaataaatggtgcatttaaatctacatcaataaccttacggaaatcttcagctttcatttcaagcattggaatacgtctgattatacctgcattatttacaagaatatcaattactcctacttctttttcaattttttcaactaattcatttactttagcttcatctgttacatcacaaacataaccatgagcttttattcctaattctgcgtaagctgctagccctttatctactaattcttgattaatatcgttaaatacaatagtagctcctgcttcagcataagactttgcgatactaaaccctataccataagaagcacctgttactaatgcaatttttccctttaatgaaaatccgtccataattcccataatcaaaatcctcctctatgtgttacattttatatttacagtatatcactacatataatcaatttcttgttatatcctttcgaaaatattgcaaatcttgaaccatagatatataatgaatgcattatatattaggtactgatgtttttaaagtaaacttacactaaaaatgaaaggagaagttttatttatgaaagaagaaaattcttgtaaagcttccataaagaactgcttagaacagcgctatttctctattgcacgcctatataaagaagaaaaaacgatggacatacatatacatgattgttatgaaatatattactctatatccggtggaaagcaaatacttattcataataagctatatgatattagccctggggacttatttgtaattaatcaatatgaaagccatcacgtttccaaggttgatagggcacatgaacgaattgttatatcaattcatccagaatttcttaaatctatatcaagtgataaaacagatttaagttattgttttacaaatcgtagtgaaaattctaatcataaaatctctttaaataaagaacagcaacaacattttctttattttatcaataaaataatagctactaatggatatggctctgacataattgaatatgcatcttttttagaactaattactttattaaatggaatttatattgcaaataataacttacatgttgacgatcactcttacaagtacaatcaacaagtccaggaaattataacatatataaatgaaaatattactgaacctattaccattgactatttagcaaatcatttttatttaagtccatcttatatatgtagaatatttaaatcagctactggaactactataaataaatatatttcagcacgaagaataaccatagctaagtcattgttagctaatggcacaaatgttaatgaggtttgtgaaaaatgtggttttaatgattatactaattttctaaaaacctttaaaaatgcagttggaatttcccctaaaaaatattcaacctttagcataagttaacgcttaaaatttttgtataactaccttaaatccataatatatttattagtaacattatctaattaactaaagtgaaatctttagcggaaacttagtttttgagtttatataaagcataatatgaaaataaagttatgcatttttaaattttgattagtttaacaattttaaaggagatatgattatgttactggaaaaaggctctaccggttcttacgttacttatctgcaatatgccttaaaaatcaaatgttgctattttgatatagttaatggggaattttcaactacaacatataattcagtgataaaataccaaaattcaaagagattaactgctaatggtgtggttgatgatactacttggactattttaaaaacagatattcaattaattcagcagcaacttaatagcaaaggctatgtcttaactgttgatggtattgctggcattaatacctataatacagtagtaaaattccaaagagaaaacggtcttgtggcggatggaatggttggatctagtacattagcagctttggttagtcaaacaccaagtacaccgccgtcttcaacatctgaacaaattgtttcaataaatcagcttaatgaagtgggttggaaaaatgtatccattaatcaaattaatgagctaaatagctgtttaaaaacatttgctataataacctttccaaggttaaggcattttataagccaatgcagttatgaatctgaatgtggactttacactaaagaagttgatcctggttataaatacgaaggtcgtgaggatttaggaaacatatatcctggagatggtccaaaatttaagggtgctggttatatacaaataactggacgaagtaactaccaaagcttttcaaattatatgcgtgataaaaacattatggacggagttaactacgtagcagctaattatccttggatgagtgctggtttctggtggtatactaataatatgaattctctttgcgatagcagatcttctgttgaaactataacaagagctgttaatggtggattaaatggccttagtggcaggcaaaaatattatgatattggtcttagagtttttaggagcgatgtctactaatttatatttttttattacataataaggatatgcctcaaaataaatattccaaagcatatccttattactaatctaccattctctgcccttatcaccagacatattatttttagttccactaggatataatactgagtaatggtacaatttaggatcatttccagagtccttaaaaacaaataaaatcttaaactcgcttccagatttatagcctataattctttccccatttgatgtaacatcatgatctggctgaccaaaaaagtctttaacatctgaaagtgaaatttgttttagctgactgtcaaatgatctaacttcaaaaacttgatcacctttattagtgccaaagacaacattcttacttgaataagtagcataatttccttttgcttctcctacccaatctgatttatctgcttttccccactttttttctatatcctgtagagttgaagtttttactgggaaatcgcagttaataatctttccctcttcagataatttcttaatattatcaagaacggctttatgttcattgttttcagtatttgatgtctcaacattactattttctgaaggagcatctgactttgaatttttgtcttcactgctttcactagtttcactgctgtttttgccatcatttgctgcatcacctgaaggcttacttgaattcgagcatcctgccattatagttataaacaaggtcataacaattattactattgattttttattaaaaaataaactcatatcatttctttaggcatatcactataagaatctataaattccttagcctaaatactcacttcctttccttttatataaatattttaacttagattcactaaaataccacaattatataatacccatgattcatattattactcattaaaaaatattgttattatactctaattttatcacttttatcatttaaataggagcctgttaataaataaaattactaataaacttacttctataataaaatcttgaggatttataagtttcgttaatataactttttccttttaagaataatttataatcaatagatggtattaaaatcaaggcttagatttttgtttgatactaaaaatctaagccttgattaaatagaattacatcattagtaattttcttaaaacttcataaaagagaattgaattttcttatgtatttaatttctttaattcttttatacattcttcgcagatagcaacttctttaaatttagtaacactttttatattgccgcaaaaaatacatccaggagcatatttttttaatattattttcttttcttcttcaaaaatttctaaagagtccttttcattaattgaaagtaatttccttgtttcctttggaattacgactcttccgagttcatcgacttttcttaccattcctgttgctctcattatcaacgttcccccttaatatattataattctactataatatatttcggaaattatttacagtctcattttttcaaattatggcaaattaataccattttttagctttaaattcttgttatcagcgttattgatagatttcaaatatttttacatttttcaaaaaattctatattttaaatagaataatataataaattatcatgatagtcattccaagtggaatccctagcctcatccattccttactattaatttttaatttaccggcagaaatgatattaggaatattccctggaatcatcattcccccactaatgagtaaccccattaacactgctttaacttgtgcctcagacattttcacacttacttcagcagacgctaatgttgcattatcaaggacggctgatgacatattaaaccaatataaatagccagtatgaaaatttattacataagtatcaattaatattttaaatccctctccaagtaattctagagctataataaataaaataattttaagtgctcttatgaatatttctttgttagtttcttctataataatttcttccgtattatttaattctattttttcttgaataccataaaatgcaccaataattccaagaataaatatagcaggtattatataaataccatacttatctaatagataccaaaagctcacattaagttttgaaacaatcattgtagacaatggctctcctataggtgttaatacagctccgattccaattgaaaaacatgcaaccacatcaatattgattttattttttctacttatcggcaatatgctaactatttctactaaaagcagagctgcaataatggcagttattatgcttgataaaaacccaataataactattaacaaaaatacaaaaaattttaatggtacatatttaagaatatatgtaagtgctccttctatatgagttgatagagctttaaatataaatccaccaattagtactgcaacagctattgtatacataaatttattttgaataattcctaaaaataattctttatttatagctcctgatgtgacacatgctaatactcctactataaataaaaatatttcaagattattttcaactttctttgatgctattggtaatacaaaagtcattaccaataataatgttaatacataaaacaaatttaacactgcccttcccttataaaataaacttgattactacttaattcctattagattttcaccataattaacaaaattacaaatgatttaaagttaatctcttagcattttaatttagcactttagctagatatagtaataaaaaaaagtaggaaactcaaataagagtttcccaccctggaaacaaatttcttggaatcaagtacaaacttgtccaaccgataaaaaaatattctattaaatctttcaaaattatagcatagaatctataaaaattcaaatggaatatgtaataaatactagcaatatatttttataaattgcatttagcaatgagatagtttaataaaaatctacggtaattttctatgaataaatatccgaaaactctacatgtgtagtttgtattagacgatttccagaaaactctaccacttcgctttcacccttctcttgaactatgctttcactaggaagaaatattgagaaagcacttcctcttccgaccttacttttaagagatatacttcctccaattgcttcaacaaatttcttaaccaaagataaacctattccagttccttctgcttgtcttgataaagaactatcaacctgaccaaacctttcaaaaattatatcagctttctcttgaggtattcctatacctttatctttaacttcaatacagatgccatcccttcttgagagtatttttacactaattgattttccttctggagtaaatttaatggcatttgataagagattgagcagtattctttcatacttttcatcatctatcccaactatcttttgtttaactgatgatgaaaatattatatcaatgctcttttgactagcatacgtatataccgaatcaacaatagccttagtcataaatattatatctatgttgcttttattaacttttattcttcctgcattagctctggtaatatccaatatattatttactagtcttagctgcctaaatgaatttaatcttatcatccttaagtactttttgagcctgtccgataattcttcactgcaaaaataatctatcgcttgaatagcagaatttataacattaagaggtgttctaaactcatgggatataagtgataaaaactcatctttcatttctaatgctttttcaagagtatcatttttttctcgttcagcttccaaaagcttaatttgaattttttctaaagctttctgattttccatgaaatctgttatatctctgctattaataattccataagcaaagtttccttctttatcaaaaacaggagttccactcacggaaacatattgttcacactcccctatttttatcttcataaagtattctttaacgtattctccacgtataatcttacaatgtggtatatcttctgccataatctcagatccatctaaatctaaaaactttttgtttgtatcatttggatgattataatccccaatatgactcattcttttttgcgccatcttatttttcaagaaaatttcgccatctttattaaaaacataaactgaatcttgcatattatcaagaatggcctgtaactgctctttttgctccaatatttttctttcattattaaaccgctccgtaatatcatgagcagaaatcaattttgtaattaaatttttcctatcatcatatattgggcaagcgcttacactataatgaatagttttatctggtcctttagctgtaataatgaagtttttaatactctcactattctttaacttaatacctggtagatcatttacttcaagcagatttccatctttatcatagtatttagtatctttgcacgtatcaccaatgcttttatatccattaatatcgtatataaatttttctgattctttatttaataaagttacactattatctggattaaacaaaaacattccatctgatgcactgctaataattgcttcaagttttttattttgttgttctataagcatctgtgcttcaatatcatgtgtaatatcatgacagcaaagaactgcaaattttatatttccattgctatcataaataggtcttccatttaaactaatatgttttgttgtagtagcattttttagagtcattatgtcatttataactacttctcccctaaatacttttgaaatagtcattttttctttagaaatttcatctccatttaaatcataaaacttaaaatgattgggattacttatcctcctaagattagtacccttaaaatattcttcagcagatttattagttaaatagcaatttttattactatcataaataaccagcgcatcgtctatactttgtataatatcatctaattcagctttttgatgtttaatttcctcttctaacttcttcctttcagttatatcgcgattagtttccagcactactagttgcccatattcatcaacaaaaatttgatgacttgtttcaatgataagttttgttccatcttttttagtatgctctatttcaccgctccatacaccatcttctaatataatttccttaatagtgtttatatccactgaatgaacagtttttaataaatcatgacttatgcagccaacagcctcatcgctggtatagccatacataagctctacacctttattccaataagtaatacttccatttaatttccaagcaaaaatagcttctcttgataagttcaacatgtctgcctgtcgttttaacgtataattctgctgtttaattatttctgcctgttgctcaattttttttctatgtaccacctgttcagttgtttctgtaagcattacaacgcaatattttatttctctctcttcaaaaataggtattaatgatattctccaataagtaattcctctactaaaaccatcatattgatattcatctatattacatgcgcatttagttctaatcaagttattccaaagcctttcatatgcacttcccttaaaacccgtcacaaactcagatatatgttttcctatacaattttctattttattaaaaggcgcatccataaaacttacatacttctcattagttttaagaagcgtcatatccggaagactatatactcccactccataataattatctaaaatcaattcatttaaaaatgaatgtttaatttcaatattcgaattcattttttcactaaagatatatatctgtttttctttctcacatattacttttatattaacaaatttaactcctaaagatttcgtgaacaaaaaatagttgatcttctcatcaatatcgctagtattaacgtttggaccaacccttaatttttcaaatacattaattatgctactattcaataattcctcatatctatactctgttaattctataaactgttcactaacatcaacaattaaaccattttctataactaaaaaaatcggacttttcttgtattcattaagcttttcttctttcatctatgacacccccattgctaataacaattatcattagttataatattcgcatagggatattttagcataatatgacatatttttctacaaaactacgtaaaaagtagaattattactcttatttacgtttaccgtctttatcaaatacttttcttaaatgaacctctgtataaaatattgatattaaaacaattattaaagatcccataacacatattatatttgatttgcctggatcattcccatataaaaaagttatcgtgatggaaaaaattattgatataactgcgcctaatatcatcattgttccactatagctatttgcttctttccatacatcattgtttttctttgaaaaagaagttctatatccataaaaattatttacctccttaggaggccacaattttagtataactccaacaacaagaaatactatgcttggtcctaagttgcctaatatctccataaaactttcctccatttaagctatatctctatacatttaaattcatttttatgccacataataaatttttcgaaatctttataagaaattcctatggtcgctgtatttacattaggatgaaaattcacaatatcttgattagctaattctttatctactaatactatgacttctctattagaatcgtttattaatccaaaaggagtaactgatcctggtttcagctttaaatatttatataaacgttcttctgatgcaaacgataacctagtacttccaatttgcttatctaaagcctttaaatcaactctcttattttcatctaaaacaactaagtaatgggtatctccttttctattcctaataaaaagatttttgcaatgacctcctggaatatcgatatctaaattttgggcttcttcaactgtatatattggattatgctcatatttagtatacttaatacctaataaatctaatatttcatatactttctgctcatttgtagtactcattttttctccttttctataagaatatatacgccttctcatataatttaatctttaaaatatattgtttattatgttatgtaattttacctaaatacaatattactatgttggaacttatttcacatatctcagtattaattaaaaatgtaacctatttaaatcataaatataaatttatcactatggcatatttttaaacctttagaattatttccgcacttattttaaactaatcttctattttctattacatgtattatctttagcaaggtaagataattaaaagcatatctctccttactaaagattatcccctaatttaaagaattaatatgcaaattttattgtatttaacatactttcaaaagatgtcatattttcatctgatatttttccacgttgcataagtgtaaataaatatgctttgttactattacaaatcattacttgttctacctgcacatccattccattaatattatgaaaatagtttagagttaacgcattattattattaaatttacgctctttaatttgtaaattgtttatatctgagcgattttttatataagtttctgctgaattaaaataaacctcttctgaatatccctccatgccatctataaccaaattcacattagttccttgattgtctagatagtaaatatcatctccttttaaagtcgttttagtccaatttgaaggatatgaaactgaaatcttatcagatttagtttctaagcctgtccaatctccattattgcttaaaatatatccatcaataactgtgtttttagccatataaccgctagcataaaaataataccattttccttctatctttttccatcctgtagaatacgaatcaccttctgtataccaccatccagtgctattacttttccattctgcacttgcacctattggagttagcgctaataccgaaaccgctattagtgatcctgctattaatttttttaattttaccattattattccccctaatttcttataatatataagctccacttaataaactttctaatcattaaaattattccactttatacttctgctttaaaggtctaactttgattaataaatttttagaactcatatataattttatcttactttcgccctttgtcaaatattccaagttatagaatcaaatagtatttattagttattgagtttggtaaaaggttaaaatctatgaatatataatttccaaatctcatttaatataaacaaaaaaaagaccagacttaatgcttacataatatctataaacattaagtctggtctgaaaataattagtaataaatgattcttattaaagccatatttattaaataatgtgtattactaattgtaactatattctattataagatttattgttctttcgaatcttttgttaacatatctctgcctttattaacttccccagctatagtttgccttaaaaattctaaattttctttcgataatcctggaatacgctccataagtaccttatcaaattcatctgccttcgatgttaaaagctcagttgcattttctgtaattctaaatttctcttctactatattccatacttccctagcagtatttatttcttcctgatgctcatttatctttattttttggcttatttcacttttcttctgaataaagaaatctattattgaatttccaacctgcttaattatcactgctaaaattgccactactgaagtatctactataggtaaaatttgattaattaatatttctttcattgtataaagcctcctttatcttaagatcttggtttcaattgcaaaaaagaagaagcttattaaagctcctcctattgcagttataaaccacttcatcatattagttaatgatttaatgttttcacataaattctttaattccgtcttaagttcccttgaatcttgctcaagcttatctaatctctctccatgattattgagccttctttcatacgtttcaattttatccttaatcaattcttcattcatgtattacttcctttctattaaaaataagtattagctttctataccattcaatattaaaactggataatgtcatcgatatattacatgaaacaaaaaagattatttagcttaataataatcttttacttggatttttatttaatttagtgcattattgtatcctattgtgtataaatattaaaagacacctacattttgaactgcaagttccttttataaactttatatttaattatctttcaaccaatcaacttatgctataacagttgctggtactttaattgtaactgttgcacctggagaaatatccccaacattaactataatatttttagatgttgaacttgaatcaactgtaccttgagttgttgttactccattaaccgaaaaatcaatatgtttaggaactggatcatttactactactgctttagctgtctttgtacccgtattagttactactatagtatatgtaaaattatctcctacccatacgtcctttacatctgctgtttttatcacacacaatgtagcatcagctgctccatgaaatatgattgtaacatctcccccggcattattagtgttatcaccttttgcatgagcaatattaattatcttatctgaatctgttggatctggatccggatttgttggttcagtcgtttttggtgttacagttacagcacatgttgcagttaaatcatcaacagttgtagctgttattactacttgcccttcttttatagctataactttacctcttgaatcaactgttgctattgattcgtcgcttgatttccatataacttgagctcctgctggagttgttgtagcaactaaatcatctgtttgtcctgcaactaaagaatcagatgttttatttaatgttatagttggtgttattggatttgtaacatttactgtacatgatgcacttaaattacttctgtcatttattattgctgttattgttgcttggccttcttttattcccgtaacatttccacgctcatctactgtcgcaattgattcatccgatgatttccataataggttagcttcgattgctgctggagtagttgttaccattagtttctttgaatcatcaacatttaactccatagatgaattatcaagcgataatgctttattatatggcaacaatgttccatttttatctatatccaatgcatctaaatatattcttttacaaccattacttcttatttctacactatgttctccatctgaaagattttcaatatcaaaagtcaacgctactatattattgctaatttgattgtatgcataaacatcataatcttttccatctatagagattatattatgtccgcttaaactaggatatccaactccgtataatcttagtttattacttgtaaaattaaatctaagtccattggtatctaatgcatccattaccaaaagtgagccagttcctgtatgattagtagcccaatctgaacgaccaaaatttcctatataagatatatttgcattggtatcatcgtacctagtccaaccattttctactgaacttaatttttgaccaagagtagccgccttagctacatttccatgttgaataattccaagtcctattataactaacaacgttaaaaacattatactgaactttttaaagtaatttttcatttatcatttctcccttaaattatcatttatgacgcgtccattaaccattttaattcctttactggtaaattccaacaacaatcgtaacacaaattcttttatatatttaaaatcaagtaattttttacaaatataaatataatacttctaaaagcaatgtttttaaataagaaataaaaaaacaccttattggtgctaatctatttcttatattcttttatttttcatcacttggtctttctgttaaatactcttctccagtaatttctgtgtattgttctttagtaagttttggcttcggtgcatttactgcatcccacaccataggcttattccataacccttcatcataaaattctttaattcttgtatatccaaataatacttgcatactacattaatcctccattcatcagtatataatagatattgctaatgtcttctcttgttagctgttcgtttgttttgggtgcgtctttgtattcatacactagctcttttgtctcatatagataatataagtccggtattttgcctgccggtacgtctggcttaggtacgctgtccacaattattccagtacttttttcttcctctgttagctgctctggaaaataatgtgttaggcctaccctagctttcgtatcatctactttttctaatcctaaaaatatcatttaaatcatctctccttttcttattatagtattttaaatcttggtttgtaaattgttgtatttcccgaattatctccgacagctataaccccagttttactaatgcctacgggcagcagtgtagtagatgattggaaatttattgagcctagctgtctgagtaacgaatcaaatctgtgtacatacgcatcattaaggttgtagttgtcctttgtggtaataacaacagtattagaacttttatcaacatccatgaaatatatatcaccataaatacatcttttaccaccctgaaatgatgcatttacaacgtgtagctcttgaaagctgcttaccccatctgtaatataatatatgttatctaaaccatctataacaagtccaactacacttgatgcagtataataattaagtttactgccactaggtgaatatttattgatgtagtttcctacagctgcccatacattaccagctgaatctattgatagacttctaggatgtataatactagaagtatttcctgcattgattgttaatactagtccaccattagaactaagcttatatatttttccaagtgcccctcctgcatatacattacctgcactatctacatcaactgcatagatccagttactactttcagggtcataatatacccaaatttgcgcaccattagaacaagctagttttctgacactataaccatcctctgctgtataaatataactttcagtagggtcaaaggctatatcaatagcatcgccatttgttgcagtttgccataatagtgtaccatttggactgaactttcttacatagctatcaccacctcgtcctgctgtataataattaccagcactatcgaatattactctatatataagataatgcgacgtatccttaataataacaggtgtatcatattgtgtattccccaaatccgcataaccacctactggaatggctgttccagttattccgagcacatttgcgtctttagtaagcttagctgctgttagacctattgctgtagctacatcagtggcatttacgtaggtatactcattagtatcccctgcatagtagcctggtgcagggcatactactagctttgcagacggattatttaagcctattaggccatatattacctgtgctgctttgcttatcggctgagtagggtatgccgaactatacatatcatcccctgttttatttctgttaatcattgtaccagtaaccttattaccattaacgtacactgtagaaccatttaaaatctgtgctgctgaagctgtagtatctgctgtatctacaatggaagatttacctgtaacaccatctatagtaatacctgctcttatatttcctggaactaataaagataaatcaagccctccaactataccagcatcattattattactaaatgttttatccttacgtacatcagacgctagtgcagtgccttccgcactagctttgataaaaaaacagtcaccagttgagttataccaaaccgtatatgcttttcctgccattaagtttggtgatgttgttgttcctggtttatataattttttaccatttatagttgttgcagctccgccattattgatacttgctataaaagttattggatatccatttactaatgttcctctaattgttaatgttattgctgtagcagatccgcctgctgtttgatacacaatatctgacaatgttgcattaacatttgaatccccaaatttaacaattgatgcatcagtatgtgggtaatatatatttcctgtactatcttgtatttctatattttttgttgccatttgttttcccccttaaatagtctttagaaataatttaacttgtgttccacttgcataatcagtaccaactttaatacttgctccatctgctcctgccggcccttgtggtccagttgcaccagttggtccagcagcacctgttgcgcctgtggctccttttaaacatattgaatatacccattttgctgtgcttgcgtctcctgaagctgtacatacatatacatttcctgtgcttgtattaaaatattgatcatttactaaagctgaagttataccacttccagtaaaaactgttgctgaggtgctagtgcctgttatcgcagttccactataccattgagatcctctaattccagatgatccctgtggaccttgtataccttggattccttgtggcccctgcatacctgttgctccactaagatctgttatatatgtgtatgctgttgaacccttaacatataattttgcattatcagcatcattaatatttccagtgtctattaacacaaagctccctatttttaatccatctgtagcaaatcctgtattcatagctgaaactgaactatacacttttgcaattgtaaatggatctccagctggtccttgcacaccttgtataccttgaaccccttgagggcctttcaataatcctccatctaacttttgttgaaacgtttgtccatcagcaaatgtaactgcatctgcgcttgttaatacatttacttcctttaatactgcacctgtactttcatctaataattgaactcttactttatctaaatttgccattatataatcgccctttcttattgactgttttaatcattatttatataaatatttaatttttaatatatattgcaattaaatttctacattatagacttaattgagcactaggcctagtagatattcaaatgtaactttattatttcaatatatacactatttttatcttcctattgaactattttaattcccatattgggacttacttttacattgtctgcaaagccatcggttattttatctgttattttaaaatacagcgtatcacttgttctatcagctatagctggcagcgtctcactaatatacaattgcattttccctgataacttagtgctgacttcttgaaattttgactgtaatatttgtatatctcctttagttgcaactactacatttggatctatcttaagatctatgctgcttgcattgcttacttctagtacaatttttatgactaaatcttttgtgcttccttctgaaattgctggtttgtaggtttctgataactttgcgatggcaatcatatctccagcatcatcaaaaataccagcttctctgatgaaaaagcctccgtcagctgctggtattactgtttctacaactatccagttttcatttgatccatcgactgaaattgcacttatatttcctgaccaaacttcttttacaattgaggtttgatcttctgaaggttcataatatgagccgtttccatctccaacttttagggttttaaagtttactttactacctgaaactgctgaagctgataatttttttctccctaattttgttaacattgtataaaaattttctgccaaattaactcatctccttactgggatatattgttatactctctgaacctgtacattggctgataccactttccatttttccgttggattcaatatttttagcaatccacggatagactgtcatagtctctcccataattgatgctaagccataatacatttgtgattgatttacggatatcagtttatacttaacgcctaaatgcgccggtttagctatttctattgaatcgtacaagctatctaaagcataaggaaagcctgtatcacttattaaatttacttgaaaatagtattctgggttattctgaattatttcagcttctgaaacaaaactcttacatatctgctttattacttcaactgttgttgtgcctttagagttaagctttgctaatacccttgctcttctttcttcaattgatttagcattatttgtagttattccaactcgtttttcccataatttcaatccccattcagttgcagtttgaggcaaaatttgcaagaataaatctgaaatatccaaacctaatttatcgaagctatgtccgtaagcattaaatatttcccggaaaatatagccattcttcatttcatcaataacatagctttctagcttatattttgactcatttccactattttcacttgaaggacttacaatattaatatttttaaatgcttcaaaatcagctgtattactcataagttatccctcccaaagatgccttatcttcatccgctgtaattatatttttagtatcattgtttatttttactgaagatatatcattaactccggctgtcattactacctttgcctcaacagtatttatttttacaactccgcctactggaattgttttaaaataattatcaagagactcttttatattgtctttaacatcctttatatcaaatccatctaatacagtaagaccaagtatattaacatcaatttttaatggattgactgatactacagttactttagcccctattggtgcctttccacttccttcaccatctgctggatctatatattgtttaactttttgtactatagtatcatctagctccattccattatttcctgcaactattacctttacagttccatttccattcattccattgcttttatcccaaagaggttttactttcacatattcaacaccagatatctgaagagcccatttttcataatcatatatatttccactgctgctttcttctctctctttagatatgattctttccaataaattttcactagtttcagtatcagttccactggtagttgcactttcatttttcacactagttatcccatttattttaattggtatttcaacaatagcattagctggaacattatatttagagcctatttctattgctttaattcctagtatgcattttccatctttaatttttccttgagatgtcaccttatattttaagccttcaacagtttgaactatgctattttcatatattatagaattttctaaccctaaaaaagtcacttgccccactgaatataagccttgcttcctctctaagccatgtcttgctgcatctttatctataaatttatcatactcctctttgggcacctctggagcttcctctccaaatactaatttcaaaattgtatctagagccttataataatctgctatagttttagcagatggagcaatagcatcatatacaaaatatccttcacttttagatattccagaatcaatactatctaacatttgtgatcttaaattttcttcagtattattttcatacatcaattgtcacctccccacaatcagttattgctgtaaaagttatggttaaaatatcattgtttttatccacctcaaagttttttacgcctaatatgtgtttattttcctttaaacattctaaagttaaccttttagcctcactttcgattaaacttttactgaaccctttaccaattattttttcaaattcattgccatatgcatcgctgtaaatcggatactttcctttgctggttttaagagctttccatatccatatttttaatgcttctattccttctacaatttgaaattttccatccttaagtttgaaatcatttttttcaaagtcccagacatattctttgggaatatctgtaactttctcttcttgtgaaaatgctgcaagtttatttgccatatttaaatttgtttcaggtaatatactagccactacatttcaccaccttacaaagtattatccatgtttgattatccttagtgggcaatactgctagctcatcgccaatttttattgtatctagaaaacttactgcagtaccatcagtatttgttactgatgcttgtcttgaatatcctgataataagtaatcagctatataaagatcatccttatatagctgcaaatcatttgtttgaattattatttcaggaggtggagaattaaccttagcaatgcatatggaaagaggattactttctgcaccttttcttttcattaaatttaacatttttacatatggatccattagctatcaacctcctgtaaatccattttgttgcttaagcttactgtaagcttcattgtatattttcctgttccacattcccaggtgtgagtatcagcattaacataaagagttgcatctttcaatatgtctaaataccatatttttgccttaacagcataccccgttaagcagctataattgccaatagcttcaatttctatttcttcactgaagccatataacttattttgtgctacttcatatgtgttgttatcatcttccactgtgtacgatgtctggaaaacaccatatctttttacaagctctgaattttccacttgatctacgtagttattgttaacgtcaaaaattttcactctgtttatcatattttctaaagaatctttgtaactcatatctattatattgttattgtacaaatccacattagcagattgaagcaaataatctgatattatttgccccttctcaattacattgaacgtatcagctttcataataggaacatattgttttccattttgcttgctaacttcactatagcactgcattattatgctataataactcttatctatacatagtctacctatcggcattccagttaccactacatcaccaactttgatgtttaattcctcacaagctttatatacaacattttctggagacatattcttaatattcatacttgttgatgaactcataatgaacctcatataatcatagcaagtaaaagtttcttcttgatttgaacttcctaaagtcctctctacaacttcacctctaaaaatttctccataagtttcatctacaatctttattaatgttcctggacatatttgaactctaggctcatttatatctgataaggaatataacatactaaatgagcattttcttgctggctgatctattgatgctgataattcaatgcttttgcaaactggagttatatctgttagaagccatccttcatataagctgtatattttaatcatatattaccacccaatatattatttacatcagttaaactaaaacttgccccccactgacctacaattttttcatttaacttcaatgccttatactgctttaatgctaatgtaaagtttatatctccagttccatcattttctccatactcaaaagtttctatagagaatagatcattgatatctgtgtttgtaagtatgactcttattggctttttactttttctccaagcttctatttgtgcaacgcactcaaatggtttaggaatatcagaatatgcacaaaatttatatttatgggcaggaaaaaagctctcaaaagatatttctgaaagctttgaatctcctaatatatttatttctccaattgattctacactaactactgaattgttgttagctagtttaagtgaataactagaaggtggtacaggaagttgtaaccatgtatcgtcttgattaaaccaaaattctatcattttaaaatacctcctaactcattccaagagctgtttgactcaatttattggctagagctgttgcaattttatctatatcgctttcttctctgattattatggaatctgcaagctttgctattgttattgcaaatccattttgtgagctatcatctttagttaatccagaagcgcctttaaatccttgactactagtcttgtttcctgatgataagtttttatttacaccagtttttattcctactgcaagatctttaattggttcagttactaaatgagtattaaccttgatgccacggcccatgccttttaaaaagtccggcatccatgtttcataatctgtaagaggtcctttatctggtactgagaaatgaagaaatgatcttatcctatctgctacacctgaaatagcatcttcaatgtaacctactgctcctcttataccatctacaattcccattatcatatctttaccccaactaatagcagttttagccacatctttaaatactgcacctattgaatttaatatatttcttataatatctatggcaccattaaatactgttcccacagtactttttatagtattccatgcgcctgaccaatctccatttataacttgcattacagttttaatcactcctgttattacgttaagtacagtcatgattactgttttaattatgttaaatgctgaagacactactgcttttatagtctgcccatgaacattccaaaaggccattatcatatttaatgcagtgcttataacagttttaatggctgtcataacagtcgtaatagtttgttttatacgtggccagttagatattacaaaacttattaattgactaaaaatttgaatggcaaatgttaatactggtttcaatattgaattccaaactgattgaattcctttaaatacattttgaattatactctttattttaggcatattagcttgaataaaggttactattgatttaactactgttattattttattaattgtctgtgtcacaatatttccaaccttaggtccaaataaattagtaaataaagctcctattccttgagctgcacttcctgttttcttgaaggtgtctattgcagcttttacagcacctgaaattttattaaatactcccataactatatctcttattccaccaaaatttgtagcaaatgcaactgcgagtaatccaactactccaattactatttgaagaggtaatggcaatttagtaaagattccaaatatagatgaaaagctctttgaaactacacctttaattttttcaaaacttccagatatcccctgtaatggtgctgatagagatggagttaacgcaccaacttttcccattgattgtttagctatattcaagacattagaccccttacctccaattccagctgattttacagtccttgatgctttagtgctatttaatttaggaattttttgagctactttggaagcccgttttcctataccgtcagtagcttttttaaccaaatcattatctttaaaggttttaaacaaatcagatacggtgctctttacatttttaatctcatcttttgcatttataaaattagttgccaagtcttcaacagtttttgatgcattagatattgatttaactacctctttagctttctgtccaatattttcaatagatctttccccagtgttatttgtaaaggcttgtattaaatctgaaacagacgttcttacatttcctactgcatcttttgtatcattaaagctgtttttaactttacctactgattctgatgctttagttattgcttgtacgctttctgttgcttttgaagccactggtgctagaccttctattgcctttttagttttctgaactccatcaacagcctttcctattgtttgtccccctttattcaagactcctgagactttacctccattggatttaggaaatttctgagatacttttgaagcctgttttcctataaaattaatagattttttacccaagtcagtacctgcaaaagccttatacaaattagatgcagtgttttttacattttcaatctcatcctttgtatttttaaaactagttctcatgtctttagctgcttttgatacattagatattgattgaactacccctttagctttttctccaatattttcaatagatctttccccagtattatctgtaaatgcttgtatcaaatcagaaacagctgatcttgtatttcctactgcatctcttgtatttttaaagctactttcgagtttatctactgattctgatgctttagatattgctttcacactttcagatgcttttgaagctactggtgatagactatcaattgccttttgagctttttgagctccatcaataacttttaataatgctgaatctagttcaaacggcattaatcatcacctcctgaatacaagacttccatttgtttcattttatcttcaatttcttgttcaataaaagcactgatgataatcttttctccaaatcccctattaattgtttctgctggccacttaccatgaagtttccagcagtaatataagagattaacagtttcatcagtgcttatgagttttttatatcttctttttggttagtagattctactcctgaaatttcagttacagtatccgctaaaatatcaacttcaccaggtaagaagatcttattcataagttcctttggtgttggagctttgaaatgtttcataagctcttctgatctaagctctggcactcctgcaagaacagtttctatttttgcttgtgctgttgcaaatccttgaatatttcctttcttatctacttgaagtactctttcttgaatttcattgtatctctccatagaaatagcattgcatttaaatgtaatctccatatttccaagtttagcaagcttaagctttacctccttagaaggcacctcaattttaccagcatctatttttaataattgttcaactaaattcataacttcatctccatttcaaatttaataaaattatagataaacaatgtgtaatctaagcttattcaattaacgtttttcttagttcttctaactataagtctagttattaaattgcatatctataattcagtaattttttatttccttgtcattactttatttttacataccttaagcaaatatctacattagaaatcgaaaatatttttgtgtagcaggcatttgaaaataagctgatgaaggttctttgtgacaggttgttgcactttagcttgtccattcgaattattggagcatgctaaagtgagtacaacctgtcatttagaaccttccagcgaaattttcatagtcctgcgtaacaaaaatatttccgatttcggcagactattgcttaactatagttttattgtggttctattaagtctaagaaatcatagcctgagaatgtaaacgcaattgtatcttcaacattctttttaacttcccagtctgccaatgttaattcatcaaaagtaacatctttaagtactactctttcagcccctactgaatctggatcagctaatttagaaattatagtacatacagtttgctttccttgtttgatgttatccttcattaaaattgccattcttgatgatatatgatgtaatttcaatgttccctttccttctatacctgttactttacttctcttccatagatcccttgtaaaattaacatctacctttgttaaagtgacttttgcttgaagagctgacacctctgaaacatattctccattaatccaaacttctccccaagtcccatttataatatcctttgcttgtggcataataattacctcctaaatatatatttgaaatttaatatcttctattgcatctaaaataacaacttgtcctttaacaaaaacttgtgaacctgtgttactttcttttatttcttgatctttcatagttgaaatatctataccttggctctttaagtacgctttttgcgcatctaaatcaatttctgctctattttgcccttcaatactgctatcaagcaatccttcaagctctagcccttcaaaataaccattaatagctgcaatgagcaagcacttatgatcataatcatttggatattttccaatataattatcttcagctgttgatttaatatcatcatgtattaaatccataatatctactatcttaatctttttaaaatcttcacctttattttcaatagtagttacaaagctatttacagctctatcaattttgactttctttccatcgttaattaaaattaattttcctgcatcaattgctgcatctctttcttctttctttagatgcggaacatctactacttccgcaagtggtgcataagtagcactaatatttagcgaagttcctgctagcattcctgcaattcttgaacagtattctgcagcagtataagttctagctgctgtttttatatcgtcggtagcaaagttaattactccttcactatcagctgggcaatgtggaagtactgctttaactctaatatccttagcacttcttaattgtttaatccatgtagcaaaatctgttgctcttgaagtaatatttgcctccgtatcagcctttccatctgcagtctgaccaatgcttggaactactacataatcccatttaatagtttccaaataattttgagcttctgaataattagctgcatctggtgcttctatataagcaatcacttgttttggtggattttgatatcctatcatggcaagttttatttgttccttattaaaatctgataaagcttctggaatttcatctatagtatccatttttattggattactataatttgctggcattgtatcctttaatataagtgcaactacgcctcttgttcctctctttgcagcagttattcctgcttctttaaaaataatttctactgatggttctcccatttttattcctccttaaattttaaaattaaatgtgcctgctttagggctttgaggggcattaaagtttctgtcttgtgcaagatctatcttgagtttcaagtgtatttctgacatttttgctctacctctcaactttcttatctttgcagttctccctagtacctttatatatccatcactaaagatttccctcattgcatcccaaacttcattttgagctattaaatcaacattcataagctcatctagcggaccaaagtaaataatcttcatagttatggtattcatataactatttctatttaagtctgcttgcctgctggtaacgtagcgaataaaaaaagaaggtcttacaatttccttctctagctttgatgtatatatttttgtatttgggaatttttcaactaacatttcattaattgaattaattaattcattaatcatgaacctcctcctgtaatccctattttattttctgcttgctttttaaaattttattgccaagcactcaccaccttttcacaaattacttccattacaaaaaagtacccagctaaaattaataagccagatactttttatatagaagatttaatgtttatgagagggaacttatcttctgttcccacttactattataagccttcttttttttaatttcttacacactttctctagtttacctataattttcttataatttttatttaatgaggtttttaagcctaatagcaatggatatatccttttctatttccgtaactctttccttctatccttgtttcaattattattattatatgttaacattttgttatacaagtttttactttaacgcttaacatgataaagctttaatatgatgttaaatgcttgactattaatatttgaatctcttattactattttttaaagctatataaggaggacatatattgaaaaaacttaattacataacacttgcaacattaattatattatcttttacagctataggctgcaactcaataggtaaaaatgaaaattctgataaaaaccaaactacagttgaaaataaaactgaagaatcaagtaaagatacaaataaaaatgataattctgaaactcgtggaaactctccaagagatcagtcaatttttgaagaaaacgaagaaagagataatactgaaagagataaaagatataaagaagtggataaatctaaactgaattatgataaaactgattcttctcttacttactatgaaactgaaaatagctttgttggcagtgaagctggaatacctaatgtagataataaaaaatacaaaaatatattatctgactatacctatgcacgtgaagtaaatccaacaaaagtaacctacgaggatgcaataaaacttgctaaaagcgtgttgcctaatgatataaaagaaataagaaataaatatgataattccactggaaaaactcacatagtttactcctctaatcaaggtaattttgtattaggtctagcatacgattatgacgaatctcataactctggtttcaccccaaattcaaagaataatactatcattggaatagattatatgaaagaaataacagaacaataaagaaggactgtagcaagatttgcttaatgacaaatctactacagtcctctattttaaattaatacaatatcttattaattccaatctccataaacaggagtattacctgaattatatcttatcctgcaatctatgaacataccataagtatcatcagaaatttgatttccatttctatcatataatgctctgattctaagataatctgggtgacttgtaccattttgtgatctactttcagtatatggtactactactgtgcctgccggatatgatgcttgaaaacttcctgatgaatcatacattcttactgcactatcagtgcggaaatatccagctggtattgcgcttgatctaaataaatattcacaccaatcactaatatcagcatctggatctaatctaccatcaacccaactccctgaagaatttacaaactttataactattgcaattggtccactgcttgtaactgcaaatcgttctttgtatcccaaacttcctatccttgtattatcctcaatatttgtagaatatactggtatacttgatcctgacatgttaattcctaaataacccataattttgcctcctaaaatataaaaataattttaattaagcttttgaggttagctaactcatttgccttatatatacttaaagaagtttttcttccattttgtaaacataaaaatcaattaaatttaaattttctttagctttagttattatttttgatttttgacaactaactctggttatttatagaattatatggattctaattagttctaaaaacctcaaaatattttactggaacataatcagttaaccacactttgttttcagataggaagaatttatatccatctttattcatctgctcactgttaattttaaatataactaattctccatgtcttttacctacttttgttgctgtttctatatcagctgataagtgaacgtattgtctattctgttttttaataccttctttgcatatgctatctataaacctgcttgcagttccatgatataatactttaggcggcttaatagcttgcaattcaagattaacttttattgaatggccctggtttgctttaattttagttttatcattattaaatgaatatctttgtttaccatcttcagctacaattctttcaatatctgaaattgtcaccttatatccttttttatttaatcccttaattaaatcaggagtactaatatatccatattcatctaaagttaatccaatttcttctggtttatgcctgagtataaggcttataaatttactaattctcatatcttcattacttatcatcgattaacacctcattttctataatctattaggttatctaaatttatatacttttattacaaactccattttaaacaaataaacaagtactattctgattaactattaaaagaaaacttcaatttcttttgaatctattaagcaaactagaattcattattaataattgatatatggactaactagctttaactacttctttgatagttcggtccataaaaccaattaatttatattttaccatactctgcaattacttgaaaaactttatgagaatgcattcttctgttatgacatacatttaaggccctagaatacgataaatgaaatccctatatacttgccatttccaaattttattatgtataatgataatgcaataatgcctcctgaattaattaagcaaacccattatcactcacaggctaaaaaaatataactttagtacatgctctgtataatataatttaaaagttctgcacttgacaaattaaagttttaagtagtacttatgtctagacaaaatattttatgactttttctttttattttactagaaacggagtacaaaaaatgactaaaaaacaaagttctattaaaattacaataagtgcgttatttattatacttatggtaggtacgcttgctactataggcttcattatattttctaattggaaaacatcgtcagataatattataaaaaaattggagaatgaagctagcaataatatattaaataaaattgaggcacttgttggaattccgttaaatacaaatgaactaaatcataatttgattgaaaatgataccatcgatatatctaataaagaaaagtgtgatgcattctttgccggagtagtgaaatcaagcagcgaagaaatttatagttttagttatggtatggaggatggcagttattatggcgctcgaagaaataaagataacaacatagagatatataggagtactccacaaacaaatggacattctctttattattctgtaaccgatgacttgcacgagggaaagtttgtagaagattttggagcttttgacccgcgtacaagagactggtatgaaattgcaaaagaaaaaaagatgcctatattttcacctctttataagcactttgtaaaggatgatttggcgctttctgcagcttatcccatttacaataaaagtggtactcttcaaggagtattgggtactcatatcattctttcaagtctaaaccaatacctgaatgatattgttaaaaataataacggaattgcctatattattgaaagaaactcaggagatatagttgctaattctcttgataagcctaattttgaaactatttcagaaagcaatataagaagaatcaaaatcgatgaaaccgaagataagcctattgctgaagcttatgaaaattataataagacttcaaacactagcttcgtcatgaagtcaggcggagataaacttcatgtaaaactaactgaatacaaaagagaaggtttagactggctaattataacggctatacctgaaagtctgtttacagctgagataaataaaaatattcaaactgcaatattattttcaattattgcacttcttctatccttgattatttacttaaagagcactgagattgtactaagaccaattaatcatttgataaatatttcagaaaagttttcaaagggagatttgcatcaaagagcaaaaatctttaaaaacgacgaaattggaaagttatctagcgcttttaataatatggcagaagaattacatatactcatagacaatcttgaagaaaaagttgaagaaagaactaagaaattagaaaaaacaaatacagaacttaagtacgcaaaaatagaagcagaaaaagctaatgaggctaaaagcgagtttcttgccaatatgagccacgaaattcgcactccattaaatgctgttattgggtttagtgaattactgaaaaatacaataaaagatgaaaaacacaaaagttatattgaaactataaatgtggcaggaaacagtttgcttactataattaacgatattctcgatctgtcaaaaatagaggctgggagaatagagctgcaatacaagcctctaaagcttagcaatatctttagagaaattaaatacatatttaaacaaaaaactaagagtaaaaacattgaatttctactagatattcaggaggactttgacgagagtattcttcttgatgaagtgagaattagacagatactattaaacctagtaggaaatgctgtaaagtttactgataagggatatgtgaagctttcactaaaaggaactacttcccaaaacaagagtagtgtggactttagaatttcaattgaggatacaggcattggtattgctgaaggtgaaagagagaaaatatttgatgctttcaaacaagcatcaggacaaagcataaagaaatttggcggcactggtcttggactctccattactaaaaagcttacagaaataatgcagggaaaaatctttgttgaaagcattgaaggaaaaggaagcactttctatgttgaattttataatgttccaatagctgcgactgaagaacttcctgaagatacaagtactgcttattttaataagtacaatttttctaatgaaaagatacttgttgtagatgatatagaaactaaccgctttttattagaggaattactttcaaaggctggtcttagagttataactgccgaaaacggatttgaagcaataaaagtatttaagcacgagaaaccagacttggcaattatagacttgattatgccataaatggacggtacgaagttgtcatcaatgcttaaagaaaatccagaattttgcgatgttccgattattgcactaagtgcatctactgcacaagacatacctaatggatgcaaatttgatgattatttgatgaagcctgttagcgctgaccggatatttagtaaaatatctaaatatattagaaataaggctgaaaaagatatgcatgtttaccctaaaaccaacagcgaaaacaccatatcaattacaattgagtctgataaacttattgatttgaagaataagattgcaccattaataaaaaaattagaaaactcaatgattataggtaatgtaaaagatttagcccaaatattaatttcatttggggaacagaatgatttgaagtctatatttgatgagggtgaggaactgattaaaagtgcagaaagttacaatataataaaaatcaaatcaagcttaagtaaaataaaaagactaaccttggaggatggactgtatgagtaacattaataaagacttgatattgatagtagatgataatccaaacaatatacaagtagtagctacaattatgtctgaaaacggatatgaactaggtattgcaatgaatgctactgaggcatataaatttcttgaagaaaacattccagaacttattttgctggatgttgatatgccagaaattgatggttttgaggtgtgcagtaccctaaaaaaaggttcaaagtataaagatatacccataatatttctaactgtgaaagatgaaaaagatgacattgtaaaggcatttgatttaggagctgtagactatgtaacaaagccatttaatagaaaagaattagtttctagagtaagaacacatatttcattaaaaaagacaaaagatgaacttaaaaagaaaaaccttgagcttgaaagaacattagaaatgaaggacgagtttctatccctaatatcacacgaatttagaactcctctcaatgttattagctcagcaattcaagctatgaactacatttgttccgatgaattgtcagataaagcaaaaaagtacttacgtatgataagacaaaatacatttagacagctaaggctggttaataatttactggatatcacaagagtaaatgcaggacgaattaaaattaataaaaagaatgtagatattgtttttttgacaaagtccattatagagtcaatatatacctatgtggctctaaagtccattgatgtgacatttgtatctttaattgaaaagaaaattataggcattgatgatgagaaatatgaaagaatacttctaaatcttctttctaatgccactaaatttactcctgaaggcaagcctattattgtaactttaagttctatagacgataagatatgtgttgaagttaaagataaaggaataggtatacctgaagataaggcgaacattatctttgaaagatttgggcaggtggatagctctctatcaagacaggcagaaggcgcaggtattggcctgtcgctagtaaagaagtttattgaagcactgggaggcagtatatctgttaaaagtgagctaggtaagggcagcaccttcactattttactgcctagtgaaactataattgaggactatatggataaagaagtagtaaatttattggataaccgcctcgtgcaaaataccaagatagaattttctgatatttatttatgatgaatttgaagaactaatgtcttagtatgaattttgtttgaagtgttagtgccacctaaaaatattcttatatcgtaaaccaataaagatatatacataatattactaaacaatttaaaaacttatataattataaagataaatcttctctttatattaaaacctgctgataaaggtaaatacttttatcagcaggtttttaaatttacttttactatttttctgtatgtcaattagccagaatattttttattttttgctatagataaatgaattattagtctacatgaagacttcccctcctattttcttagtcacccgaataattaatcatattacaaaacttcctataaacgcattattgtatttagatgagtaaatcaaaaacttctaaaatgtagtaaaaatactacttcaggctaacctccaataaattaatataaattattttctatttttatataaactgtacattcttggccgtatatctacatgtagaaattaacttaacaataaatacaacatatgtgagtcaattagtttaatttgcaacattaagtgagaaaggaggttcatatgaattttgattacattgaaaatttggtgataagatgtaaaaataatgatgaagcggcaaaagagaaactaactaatgagtttaagcctttaatctataatatttcaaagaaaacttttgttgatagatacagcacctacgatattcagcaggaatgttataaatcactttttaaatctgtttccatgtataatttggagaagcataggtttgttgcttatgctactaatgcaataaagaataatgtaaatgatttgattagaaaaacaaatttcagaagttctactgacagtcatgatgctttaagtttttatgctagttttgaagaagatatcccttcacaagaaatatctattgaggcttcattatgtgaaatctgtgattatgaggatttaaagctagctcttaaaactttaaataaagaagaaattgaacttataaattttatattttataagaatcatactgttagggaatatgctgcttttaaagatatgtgctactctacagctattttaaaaaagaaaactattttaagaaaaatatttaatagcatcccagtatattattaaaatctaacagctccaaggttaacatttaccttagagctgttatttttattatatattatacaataagagatttacacttaaaactctagcaaggcaagtactaaattaaaactagaattcagtaacttagtcttttttaaagaagaatccgacttattagatgaacatatttgcaaagttgccaaaactttaattcatatcttcagtagaaatcataaattatcaccacaaaaataaattttttatgttactgcacccaagccccattttcatctactgtatatccattaattattgtgttagctgccatagagccatttccattcaaataataccatttttcatctgtctttatccagcctgttaacattgaaccatcgttgtttaaataataccagtttccatcaaccttagcccatcctgtctgcattccgccatcatctttaaataggtaccactttccatttactgattcccacgctgttgccatatccccactgtttcttagatagtatgttacatttccatcttgaacccagccagtcttcatagttccatcattattcaaatagtaccattttccattatccaatctccagtctgtttgcatatttcctgttgaattaaataaataccacgaaccatttatttgtctccatccaacaacagtatgtccattttctatgtatcttttatctccattagctgcattttcccatccattatgagtaacgcctccattagatgaattatttgtttctgtagcattgttgttattgtttgtgcctgaatgatgatgacttgaggatgaagaacttgatattcctaaaatttttccagtaacatcttcaaaagtttttccatcataatttactgatactttaatatatttacctgcatcgctatttaccaatttgtaagtcccaccacttccaataacatccccattatcagcatctatactagataatctataccaatcataggttacagctgaagatgtcgtaaattttgttccagagcttgttaatagttctgtttctaacgtattcccaactgtatctattcctttaattgtcaccgacgctggtgttgttacatttgattggtcatcttcatgttttactataacatctacacttgcttttaaactatttgaattaataacacctgatggcattattaatgtccccgtaaatgtatatgttccttcattatctttatcataaactggtgtcccatcatcccatataactgctgcacttgttgttgtattattatttaaatctatatctattgtttctggtaatcctatatcactttttccagtcccattatcaacatatatatcttttattgttgcaacatctttcacttttatttcagttgatgctattttataaacttttttagcggcataatctgcaacaaaaatatttccgctattatctctagttattgccatagtattggagagtcctgaaataatagtactaataaaagtcccatcagcactgtactttttaacatctgttttttctgctgcaaaaatatttccctcgctatctatagctactccatctggttcactaagtccagaaacgatattcccaactaatgtaccatctgaactgtatttcttaataaatgaagtatctgaaacaaaaatattcccactatcatctatagctactcccattgagtaactaattcctgatatagaactaattaatgtaccatttgagctatatttctttgcatctgaagaagatcctgtaactataatattatcactgctatctattgctattcccattggattacttaatcctgatgcaatagtattaatatatgtaccatcagcactatatttcttaacatttcctgcacctgattccgtaacgataatatctccactactatctattactactccatggggcctactcaatccagaaatgatagtactaattagtgtgccatcagcgctgtatttcttaatatttcccgcattatactcagtaacaataatgtttccatcattatctatagctattccagatggaccattaatctctgaaataatagttgcatagctactatcagcgtaagtcttaattggacacaaaaaagtaaagctcataaacattataattgccattgataatactttttttctttttttactaatattttctctaaattctctcatttacatcccccttaattctacatttttatccttttaaatgttatatttcgaaatataatattattatataaaacttttcattataattccataaaaatataaatttttttgttatttatgcaacattttgataatttgttatatatgttatattctcaatgaataaattgaaacagattataattttctagagaataaaaaaacctaaagcatcaaagtatatttaactataccttctctgctttaggttaaacaatttggtggctcacccgggaatcgaacccgggacaccatgattaaaagtcatgtgctctaccgactgagctagtgaaccaaaataataatcataataggatgcttttgcaaataattaaactaaatcaatttccctgcagcctattaatgttttacatggggtgaacgatgggactcgaacccacgacaaccagtgccacaaactggcgctctaccaactgaactacgttcaccatttatggtgcgttttaagggattcgaacccctggcccacgccttagaagggcgttgctctatccagctgagctaaaaacgcatattatttattatgttgcaaactttttatttttttggagcgggtagtgggaatcgaacccacctttccagcttggaaggctggagtattaccgatatacgatacccgcaactaatctgcttgtttattatatgttacatattataggttgtcaacataaaaatttaatttttttcaaataaagtgctgaatattgtatttttttccgcaaattcaccgtgtttgtaaacctatcacttagcagtatcacacgctttgacttttttcttcgctaaattaatataaatttataaatatatttaaatttctatctctttgagtataatgcttttcaataataagttcatatttgaaattttagtaagcaaactgctcaataaataatccaatataaaaaaattaattatgctatttaaccaaattttgatattaaattagaattcactctcaattatttattagcctcttcttttttattccatgtcttattaaattaaaaatcaaaccataaaataaaaatgttaacagatgtgctatatatatttttatagtcacagaaggttgagctgataaactgtgcctaattacagtgccactatctaacccagttctaaatgactcaactaatatttttttcatttactccccgcccacatttattttcataaataattatttcatattaatttattattgtcttaaatttttttattaccttctaaaaaattcaatcatatattatatccctattatactccactaaaagttgttaatttaaatactaacctctccttaagcgcatttttcaagcatattctgaagaatatatattcttctatggtaatattctagagaatatttattctccagaataaatattgtgaagaatattagaatattctctttttctgcatatatcttaagtgagataaatgagaattcaaaaaagttatcctgcaaaaagttagagctcaaatttttcatttaattaacagaattctttcatttgatcttttatatttagaatcatacatttcttttctgttatcatttatagaaagaatgtacaaaaatttattatacgaggagaatacttatgagtaaaagaaaacaaaatgaactaccaaaaaatgattttgcaccagatgagaatgaagaaataattggttttacacctgaaccagtcatttctggcaagtgcatttcatctttttcatttgatgatgatgaagatgaaataaatactgctatgtccaataacagcagtaataataataataataataataataataattgtagttataacagtaataatagatcgtctattgaatctaataatcctgctctaatcatctcatttgatgatgaagcagcatctacccaaaatgttaaagcatctaattctaatattcttgcagataatagaaaagtttcattagcaaatggcatggctccgcctattgatggtgaattcctagatattaaacgaacttatatgcttagatcttctactgttagaaaagttaatgaattaaagagcaggcatcctgacttaaatacctatgtaagtactatagtggacatggctatagctcactactataattacatagtaaatgaaggcgaaaaaaaagaataatctactagggtgtaatagatcattctaaatactggttatcatttatttaataaggggtaaataatgattaactatcttataaatttataatactagatgaatatgtcaattgtatgacaagctataattttctaaatcagttcttagaattttgtaatagtctatttttcttaacttgccacaatatattttgaatataatttcaccgctttcaaatactataaattatgaaaggtggtgagtataatgaaaaaatttattgttacattttctatttttttattcttattacttagcataaatacaataaatgcttttgctgctagtaaaactttaactcaagggctgtataccttaaaagactcaggcttatcagcaggcgttgattataatgttgaaaataattcttctggtagagccatacttcttatagttgatagtactcaattaatacaagaattaattcgttttgaacctaattaaagcctctaaattatggggatataattataatagttactgcgggtaaattagaattctcttaatgagtatatttatgaatttatcaatgcctgctgactcattgtcatccagctatctattaatctacttaagcattttgtattaatatgctgatatattgaactaattttcattctatattaaaacaactttctattgctttatacgagacaaaattataattgtagttataatacatgccgttccaatccattgtgctattccaagctcctcatgtaaccataatacagataatatagcagccgataaaggttcagctgatgataatatacttgactctgtcggctttatataatttaagctttctaagaagcaagtaaaagcaattaacgttccaaataatactacaaatataatagctaatattgaattagtagaccaaattccagtgcaattccatggctgctcaataaagctaaaggatattcctcctattaacatcccccacccaactactaatatagatccccattttctaagaagtaagcgaggttgtaaagtataaaaggctgctgcaaatgctgatgcaattccccaaaacaatgccaaccttgaaatagatatactatgaatattcccctttgtaataataaaagatgtacctagcattgctagtccaatagcaataatttctttaagcttaggaatttttttattacgaatggctaaataacaagtaattattactggtgatgaatattgaagtattgtcgctgttgctgcattcccatatttaattgccgcaaaatatgtatattgtactcctagcatacctaaaacgctaaaaaatataagacttagcgcatcattcttacttttccatacttcccatatattttgctcacctttcataaaagtatataataataaaattattcccgatgataataagcgtattacaacaagccactctggactaaatccttttttctgaaataagtattgagcagcagtacctgatattccccataacatggctcctatgattaccaggattattccctttatccttggctgaaagttcactatgcttcctcctttttgtatttattcttaattaacctatatacattgcaaaaataatccttcatcataattctaaaaatattgcaagaattttagccgtaattgtgcattgttaaatgtgcattatgaattgcaacatatatataattttttataatatctattacagccaattgcaactatattgatttaataaagcaagtatgtaataattttattattatttctggcattaaacaattaatatattgtcaaaaattaaaactatattagcgagatgataataatgcaagcaacaagaatagaagtaaatgataatttgcaagaaacagtaaaacatggttctcatgattttccactagcaatttatactgacaaatttaatctgtttgaagatggatatataagatggcattggcacaaagaagtacaattttcatattcactttatgataaagtagtagtttttattgaagatgaagaaataatcttatctccaggtgaaggaattatgataaattcaaatgtacttcatcaaattaaaccatataaaaatatcgattgtatgatgttttccattgattttgattcaactttaattggaggaagtgaagaatcccttattgaaaaaaagtacttatctccaattattgagagtaataatttaaaatttatctctttaaaacctgacgttccttggcaaaaaagaatcttatcgcatctggaacaagtttttatattatctcacgaaaaatcatatggatatgagttggaaatgaaaaattatttaagtattgtttggttaaacttaattaaagaaataaaggaagatattaaaatatctatgccttcagcatcaaatgatgatgaacgtgtgaaaatggcaatgcaatatattcaaaagcattatgcagataatattgatctagatagtatcgcaagagctgcaaatatcagcaaaagcgagtgctgtcgaagctttaaaagaattttgaaagtaactccttttgaatacttaatggaatatagagtttcaaaagcagcagagctacttctaaaaaataaggattccatttctaatatttctctcgatgtaggttttaatggcataagttactttggaaaagtatttaaaaagtacaggaattgttctccgtctgaatatagaactaaatattgccgcaggtaaagtgattataaaatatatactatacctacagcgctatagcttgcttttattaataacatgagcattttatgcatttacggaatattatatatataaagaaactctatggtactatttataaaaattaatccgtaggagatgtaatttatgttagaaaataatagtaattatatactagataataaaagtgctaaattacaagaagtagttagcattcctatttctttatataaatcaatgagaggaagatactttgtaggccagacagaaactttatgggtgggtaatggttcaaatgcctgggctggtttggtaaatccacgtaattcagatgtcaatttatatgcaaatgtatttactatttcaaatttatctaatgactatttaactgcccaaatatggttaaatactagttttcctgaaaaagcttgtgtatcccgtaagacctctccaaccaacactgcgttaaagccaatgcccaaaaacaaggtagatgttagatttattgaatctactagaattgttcctaaagatggagttaatgtatatgaaagaatagtacctcctaatacaacattagtaggtgaggaagatggaaaatttatagaagctccaggtggaaactatactctaattataaaatcatcaaatttaacaattgataaggtagtagtcgcatttggatggtgggaaaaaccaatatgtaaaaagtagattctattaaatatcttgcctaatgttccccccatatgaataattatttttaacttgcatataatatgattgcttctcattatgttattatttacgaaatccattttgactccattattggggtcttttttatttaaagaattatttattactatctagaattatttaaacttatccttcatataattaaaggaaacctcttgagtgttatttttttgttctcttggttacccttcattcatagttacttttttgttttaatccattcacttttgggccccttattttaggggcttttattattttttgcatgaataattttatgaaatatccacaaactagaatgtcttcataatcaaatcaaaactccatttttgatctatttaattctaaatatgtgatatttatattatgtattatttaagatatattagggcatgatataaatcccccataaatattaattatcacatacataaaaatgcccctttattggggcatttttatatttaacaaaggtcatagaaaaaccaccttaatttaagtatgataaatattcaaatgctgttattccatatatgcttttaaaatgcttatttaaatgtgttaaatcaacaaaaccacactctgctaccgctgaataaacatctctatttttctctattaacttttttgccatttctactttacagttaagaaaatattggtacggtgaaattccagtattagctttaaataatctaataaactgaaattttgacatattaagctctctacaaatatcatcaagccttaatacattctctaagttataataaatcatatcctttgattttttgattaaagcattttctttcttgtaacttatacaaagatcagtttgtgtaaaactatctgcaagtgataaaaaaaattcactacacaatgcttcatcttttcctcttaatattgcattagaaagatttaatatttgttgttcaagtctgtaattataaataataggagaagaaaaacgaactatatcctttttttcaatactctctaaaaataattttggctcaatatataacataatataatcaagacctgtctcatcatgtgccattccgtcatgtggctgttcaggattaaaaagcataacaccattttgataggataattgcaagctgccatctaagttatactgctgaatgcctcgcaacgttacacctattgcatattccttatgagagtgtttcttatatttaaagtcagcaaaacttgctgataacgcgataatacctgctgattttttatatacaaatttatccatacaaatcaccccttaatcagctcgcctacaccagatactattattgcagaataaactaaaaataatgccataattatattaacaattttttgatgtttctgcaaaaatgtcttaaagattgtaccaaaaagtacccatgtaataaatgcaccaaatccaataattgttatatatgcaacaaataccattaaagtagatagtttagtataatatggcataacgaaactcggaattactgtcattgtaaataatacgacctttggattcacaaactgcataagaaaccctgataaaaaagttgccgtttcttttgcagttgattttgatgtatccctcttgcatatttgataagcaagatagagaatataaagacttccaattatctgcatgatgcatagaatttttggcaaaaccgccataagtacagtatttaaaatagctgaaataataagtaataaaccaaacgcaatagttgctccatatgtatactccattgccttctttgtcccccaattatttaccgtagacaatattacaatattcgtaggtccaggcgtaactgtaacaataatacagtaaataagaaaagatgtaatattcatgaatcaagcccctttcaaagtattctcatgaattatacatctaaacctaaatagcatatagtatattattgcagggtgatattcccaaataaccttctagtatgaatcatataatcgtcttactttttgtttatttcaccttttattgcgattatttcatgtacatatattaacctaaattctttctcatcaatatatgtaggcaatcttcctctaaataagcctctccctgcttttcatacccttgtttttcataaaattctgcaactcgtgcctgtcctgacaacattacgctttttccaccttctcgagtaatactatcttctgcagcattaagcattttggctccaatatttttccctcgccattcctttaaaacagctactctccctatgacaaatgactgtttcttactatcaaaatatattctacaagttgagattgcttgttctccctcatacataaccatgtgcttagcaattccatcaatttcatcaaactcttcaacaaagccctgctcttttacaaacacttctactcttatttttttagcctcttctggtaaatagttatactctttaattatcattttatgacctccccttcaaaacaaaaggcatccaaaagctaaccttatagtgtgaaaacacaccgtacctacggctggcttttgtatgccttataatacaatcatccggtgatgaaagtataagctcttatttattttttaaataaattatatataaaaatttgttgtaagtcaatgaataatgctattcaattttgacagcatccccattaactccattgcctaagataacagcttgttttgcgttagaagtatctgtattggcaagctgaatattcgtagtcttgtctccttctaacgaaagaaaattatctgttccatcaggacatagtacattattaaattcataaccatcactattttttagagtgaatacacttccctgctgcggaaaaatacatttctgtttaaattttaaaatacaactaaataatatacattctctgtgaaatttatatgaaatattatagatattgttgctgctgcttatatcattagctagtttgtaaaaacattatttatatatcttttatatcctagcaacattgccaatcatatactactttcgaaaaatccttgtccttcaaagcattcttaggaatagaaaaaacacaatttccagaatctccaaacataattccacactcatcatctatatctaactgcaataaaagaaaatcctcatcactaaaacctaggtaatcattttgtacaaaatatggataacctccaactctgctgtcacagctatagcaatcgtcactcagcttctcatactcttcttctgaaagttcattcttataagtcgtttcaaacagctctaacgaagaagacataggcatctctcttatttcaaaatacatttttccattatttaaaaaaggaaggccttctttatattcttcactattttcataaggattttcctttattaattgcgtttcatcttcttcataattttctatataccttacgacaatagggctttctaagccaaacatatcatcatttacaataaaaaactgcaatagtcctttctctggtagatcattcaaatttttaatttctgatagatttagctgtgctaaaaatatcataggttctccatcttcatctaatgggtactcttcaatatttttaagataaggacatcctcctagtttactctccaatggttttgtttcttcacatttgaaagttatctcgttactatacctaaaagttctttttattatattttcatgtgcttttaaattctcaggaatttcgtatttaatcatcttctccctccaatatgtttcaatatctatataattttctctttattatatacttcgcttatcaattattttatatattttcatcagtctattattcagaataaaatccatttttataaaatgctaatttaagtagatcatgaactttttatagttaaaactaccattaaaattataaaaaatacagatatgtttcttccaacctttgctccataattctctatgtatttatgacctataaaagctgaaataataaataaaatcattgaaataaccataactggaaatcttattccgatagacgccagtatattttcaccaatactcttctcccctaaagaggtaaatgaaaacatcatagaaaatatagaaattataaatgctgatgttcctactccacattttcttttattaatattgcttatcttcttttccatattgcaatttccctttcttatagaaactaattataattcaatagaaaccttataagctaattgtaacatatttgtaaatattaacttattattttttagataaccgtagaatcacttattacttagccccacaaaatttatatccatcttacaacctcttctaatggctttcgtggccttggatatggtgattgatctggatatccaattgctactgctgctacaagttcatctttgcaatttaaccatgagcatatttctctgttacaataaaatatgtcgcagatccaaagagttcctaatttaaaatcctgcgctgctaaaagtagtgtttgtattgcagctccaattgactgagtatcagtaagtgatctatgatgattataatcttcttcaaaattagaaaaagtgttaaatactaatattactgccgatgcttcattaattgaattcatacttaacttcaagctaccggtagatttattctcttttttattccggtctaatgaattccccataattcttaccatttcatcttttgtgttattttgtgcaacaacaaacttccatggttgacgattctttcctgacggtgctttagttgctaattctaagatcttttctattatttcttttggtactaccttatctttaaactttcgtatacttctacgctcttctattgctcttattatatccatactaatctcctaaatttaatacttttacttgaattataaatctacagttacttatatttatttactctcacgaattaacataagttattatttcccctatattcttcttatctgtaaaatctactggtttattataaatagcaagcattcctttttcatctgctgataaatcttcctttttcttattttttattttccatttcaataatgtcataagaaatttatcaaaagaacttagcttattataattaaatccacctcttagataaaagaatttgatatatttttgttcatctactgtaaagtttttatttattacttcgtttataacattatctcttaaaggtgatgctcctgttgcaaacacaattaacctcttatctttaattttgttaatgttctttttaattaatcctatcccaataatgcctacagcatacaaacttccaccataaattacggtatcatactcatttaacatattaatatcaacatttgatgcattaaaaatatctgctgatagcgcttctgcaatccactctgcatatttttttgtaaagcctgttttagatttatagattactactgttttcattatccacctctatatggcatacattattttatagtgatataaaaataatattttttgattattatataagttctaattaataaaatttatagcttataaaattactacatataaaatataacatttgcaaagataagtattaaaatttattaagaaagttatgaaataactactttggcattaattacataccatagtcttaattaatgtattactatttattttgcggaaataatctatccttgtaataagattcggcttgatatattgcacctaaaggattatgtgccaaaactctatcttttactgcgaacacagttattggagcctctgaatactttataaataaagaatcatggccaacacataaacctaaaataatgtttaaatctgtttttgctccatttaaaaactcagcttgaccaattggattacacattggcacatttgattttatatcaataaattcttttgatattcctccatttttacaaataactgaatttacagtaaatccattgtgtttaaatactttactcaaaacttttgcttcattagataatccaatacaaaatgcaatacctaaattcttaaactcacatctattggcaaagtcaattatctcttcaatccttgttttttcacaatatccttcacttacaactaacgctgaggccttagcaattttaagattatctttttctttgtagacttcattaatttcttctattttttcatcaagacttggacaatttttaggagctttatcaagttctcttttattacaagcatgaatagaacacaaagcacaattatacattataaaatccttctttcattataaccttttggggaatactatgatttactcatgaatttactgcatgacaatattccatattaaactaattataacatatattgtttgtttattttgttgtatattttccataaactgtgtcaataattaaaacataacttcatattaaaataaaaaagagatagcttttatttattatcattcacctgatttttcgctatctctatttttgcgcaaaaaaataaagatgaatcagatatccttctctaatcaatctttatttttatgtaaaactgactttatgttgttatattgcaaataagtcttttttgtattacacataaaaaataataaattaaacttctttaataagacaattttacaacttactattgttttctagtaatttataactatacacatattgtttattaaatttagcctaaatcattattatctccaacgtttaagagttggtaataatgttgtcatttcttttcttgcttcttcttcccctattacttttcccaaaaccggtacaattacctccaccatttctttcatagacatattgggatcaataaattttccgtctttatagcaatttgtacaataaatactcgcacatccgtcttgctcttttgctataaaatgtgcatgttcttcattaaacggtaacccacaactctgacacatcggtacttctgtcattcttatcattcctttcatataatacacatcattattcaaccaactactctcctacatttattataacataactaataaatgtgttgctttttagtaatcacaaaatgattattataatgacattatcatcgctcatttaaatatttttactaatgtaataattatcttatgtaatattacattaaatctttttatttttattgctatcttaagtaactattttctctatattatatagtatataatatagagaatatttctcatatttaatttgcaatctgatcatggtaccttctactactttctgcagttagtttaaatataataatagcagtagtttttttatctactgcttttctccaattattaaaaacaaaaaatatattaagcattcatacccaatatacttttaataatttttaatatgtttaatttatccacgattattataactgatttacctgaaaatcatacatgttttgcataatacatatcattattacttacccaaatattcctgataaggaagacggactgagattcctgtttcatcaaattcgtaatttgtaccatataatggatttctattataaacatagttcattccaacattgtaaagaactttagcaacctctgatgggtcttgaaatacggaaccagtcatcatgccagcatcaattaattctctggcttctggtattgcctcaattccaactaccggtattgttggcgtattttctcctttattataaccatattcttgtaatgctttaatagcgcctatagccataggatcattatttgcaaatattgcttcaaccctatttccatgttgtagaaataatgctttaataacttctttggcctcatcttcattccaattacaagctcttactgcgagctcttgagtttttattttagaattattaacttttagaataggatactctgtttccttaactgactctaaattattttcctgtcccattaacataatatattgtagtacattatctttatttttatctataaatgattttttctcattccataaattagtaacaatttctccctgtaataaccctgcttcttctaccctagttccaacataacaacacttgttataggattttatagactcaatagcagcaggctctctactaaataaaattatcggaatatttactcttttaactttctcaacaacttcttgtgtgctatgtgttgtaactaaattcactaagaatagatcaacacctctttttttaattaattcatctatgcttgaattttgcactgattgatcatttttgccatcataaaaagtaaattttatttttccttcattctccttttgaatttcttctaagttttgacgtattaatgatatataaatatcatcaaagctatataataatactgcaacattgattggtctgtctttactgaaaatttggctcgcattagctatttctctagtacaagataacataataattgttatcataaatgtaataattatattatgtaatataacattgaatcttttcatttttatcctccgtataattctttatctgaataacatataaatttaatatatttatttgaagatttaaatcgcataatcaaatatatcttattttatatttcattaaaaagatttatactaggcatttagtgggaagtttacttatcttaattaagattatggtacttataccacagcaataatacattaaatttataatatatactgccaaaataatccttcataatgattctaaaaatattgcaagaattttaaccttaattgtgaaatgtgcatcgtgaattgcaacgtatatataatctcaactttaaatatagtttaatttttattaagcatttaattattaatgatagaaataaacttctcagttaaattagatatcttttcattcttacgtgtacaaataacaatttcattttttagatcaacattatctacataaattctagccaatttccccatgtcaatgaattctttagcagcaattgatgaacaaaaactcacaccatatccagacgtagatgccataagagtttcatgtagcccattaaattcaagagctatgtcaggcactttaatactactaatatgacaaagtgattccaaaagtaccctagcataacttcctttttccctcattataaatggttctaacataatatcatttatactaacctttttgtttgcatatttgtgatttagtgaagctacaaaccataaatcatcatcccttattttaatggtatcaattctgtctgtatatttcattgctccaccccctaaaactgcaacatctactttatatgagatgagatgatcaatggcttcttcagtatttaatgtattaatctcaacagttatatctttattctctttttttaatttagccgcccacattggtattagaaaatttgttgaaagataatttccggctatttttaatgtaccatttttaccttttttataattatctattaatgcttccattctattttctattttaaaaactgcatctgcttcttttaccaattgttcacctatttcacttaaacaaatgcctctgccctgtggtaaaaataatgtaataccattttctctttcaaactttttaatttgtgatgtaattgctggttgactaatttttaattgctctgatgcaactgttacacttcctgctttagctactatataaaacaatcttaatccatgtaaattcatattttctccattcatatattttatttatgaatataataataacatatattatacatatagattttgttttgatatactctctttataaattattgccggcattttttataataaaatatttaggagcgaactatgggacaaactgttttatatttgattagacatggacaaacaaagtggaatctagaaaaacgaatgcaaggccataaagattcccctttaacaaaggttggcatatctcaggctcaaaaactgagttatagacttatgaatgaaaaagttgatttgatatactctagtgaaagtaaacgcgcttatgatactgccaaaatcatccagcataatcgaaacattcctataaacacaatgaaagaattgaaggaaatccatatgggaaaatgggagggtatgaatcaaacagatattattaataagtatcctgaaacttgggaaaatttttggaataacccttctgtatatattccaactgatgaaggagaatcttatgaagaattgaaagctagggtcatcccctcaattcaagaaattattaatttaaatcaaggcaaaagtattgttattgttacacatagaattaccttaaaagttattatgtcacatttcatgagtcaaaatatttgtgatatttgtgaaaatccagatatagaatcagctagcctttcaaaaatacatatagaaaatgaagtgccaaaaatactgttatacggagatatatctcactataaatagaaattatttagcctaaaatacctttattgtaattaatataatgaaaggcagattaaacacctctatataatctgccttcatctcttcttttaaatcaagctaacttttttattaattaccccttcatttttagcttgaactaataacttattatgtacgattctagttttatttatatctactagaaagtctttgtcactctcgtatataagatctttatattctgtagcttgatcgtgaagaacttctaacgcctgtaatattgttaacatttcaatctcatttaattttatttccatataaaccaccccataaattttatttcaaaatccctatatggctatattcgaaaattttaataacttcttttactttttcgtaacaaaaattacgacaaaaaaatacagccaactagtggctgcaaaattaactaaggtatactaatgaaaacttttttacaagatttattataatatagttttctgaacactagcttaacagctaaaatattcttattaattctctactataaacttatcttcatttaaaatatgcttgtctatccaatctacaacaaattctaatatcttctttactgactcatcttgatttaaatctatttcgtgtaaatcaagattatcaatagattttataaaatcttcatgtattactttatgtgataagaattttttatatcctacactcaacatatattcctcttcagatttaaaatgaaatatagtatactcttttaattccccaagtatttcagtaattctatcatacttatcaagtataaaatcatttgttaataatttataagcacgatccgcaatctcaaataatttttcatgctgctcatcaatgagttttaccccaacttcataatccgccttccattttaccatcaaatcacctcaagtaacaaaattctctaatattttatcatattgtggcaatatattatatatttttagtacttaatgactctggaaatatagagtataattaaaaatcgcttttgttcaagcagtaataaactttattatcattcgctttagcatacttaaatccagacttttcaattgctctcttagactgattattgtttacaaaatgagaacacacaatagaatcaagctcttcttcattaaatccataactaagaacttgtctaagcgcttctggcattaaaccttgcccccaatatttttgtgataaaacacatcctatttcttttgaatttatatatattccttctgaatatttatgtaattcaatccatccaattactttattaatattttttaattcaactgcccataatgaatcagaagaatctatgataaattgcttcaaaatctttaagctctcttctttgttgttcttcacactaaagcctgctaaatttgcaactttttcatttgacataaattcatgtaaatcatctaaatcagaatttttccaaggtcttaaaatcaatctatcactctctaatattctcatttctaatttatcctccaatattttgtctaaattgcatattcacttcagcaaagcaatatcacttatatttctatgtataaaatcctctgctgtctggctctcattatctttcaattcactccttgtaatattggctgcaagccaatgtgtccaagcaaaacctcctgttactggataggcatctttatcttctaatactattgcaaatgaagcagtatttactggagcattttcaatttttaatggaagagaaaaagttggaactccattctcattaaaatgttctccacgactaccatattgatcttgaataatcccatttataatacctgcacttgttgctatcatatattacccccaaagctattatttataggcaaattatagcaaagagcttttataacgtaaattactaacttttttgtgggtattactctggaataacctttttttcaatcaatgtcttttccataccatgttcctttaagtaatcaatcccaatggattgcatgatttttagggcatctataatcttcattcccatatctattgttaaagagtattccacacgaagaggatagccatcaaatgatctcttttccacaaatccataatcaattaattcttttaattgctctaatagcattttttgattaatcccatcaatatctctttctaatttagctaatgatgtagggcctaatcgcaatcgccataatataatagatttccattttcctttaatcatatcgtgtactagttctaaaggacacgtgtattcttttcttattttcattgtatctcctaaaaataaattcttatttatactacctttgcaggtaattcacttttatataatcaatccatttatcttgaagcttctcttctgtcattccaaaaatctctacaatactatttggttcctttattaagtttcgcaacttttcatacccaaatagtttaattatagattctactatggtatatgagtattgatatccattacgtgcaaaaaaagtttcaaaatccgctcctgtatctagttctttaaatgtaggaataatattattttctaatccattttgaacagtttttattatccagttttcattattgtcttttgcttcataacatgctattccttcatttagccatctaggtgtattatcatttatattatttactatcatgtgtacaaattcgtgaaccgctgtatttaatacgttataaaaatcagaacctggtggtggatttaaaggtgatgctattacaattttgctaaccccaattccgcctctcacccagtcaggcgcatttggaaatcctaatgccatatgaagttcattatggtctgggtgtatttctatagttaatttttcgttaagttgcatatttaagttattagtaatcctattatagttatcttaaaggacattagacactttatctatgcactctttatcaaattcagtataacgaattatgaaattttgagtttcttttcttaaatttagtttataatctttctctctattaacatttttaatttctagattatcgaaggattcctccacttttcccgccattttaattttactcctttaatgatatttttacatataaccaaatatctttatttagcactcatatttattcaatgttaatgcaacttttctatatattaattttaaattttcaataatattatggaattgcatatttgtttcataactattccaattatcttgttatacaaggttaaaataattaattacaataagaatcatcaaaactttaacgatatttgcgatagtagaagtaactatcactctccatattaggttgcttgtgatcaattggagttcttttctcgaacaatttaaactgtgctttttcggccactttacatgacgcaatattttcacaatcgatagtaagaatcatatatggaatgtctgatacgcttatgcaccattcatacaatactcttagtgcttctgttgcatatccatttccaacatgatcttcatctataaaatatgccatctccacttcatttagtgtatcttccaatcccattccaaccatgccaattaactcatctgtttcttttaatgcaacagcatatcttttattttcataaatatcctttgaatccttttgcgtctgaagccaatcaatataacctgaaagccttcctttaacagttctattttcggatcagtctctcataaaccttattacatctttttgccatatgattttcattaaattttctttatctttatgttgaaaatcgcgaataattaatctatctgtttctattagcatatttttcacctcatattaaaataatacttttttcattctctttattaatataaaactctctataaaaatataaattatcataataattaatggcataattaaactaggtatattaaaatgcataagatttaaatatgctgttgaaacttcatttataggaggaaaaatccacattacatattttgaatatggaacctcattaattactggtcctttaattatactcattaatacaataaagattgcacctagtatggccatttttctatttgatattattcttggttgcaataacataccaattaatgctcctattattgataaaaacatgtggataataaatgaaacaaatatatcgctgaatgtaacaggatatttaaaaacattacaaatcaaattataaataataggaagtccaacagataatatagaaagaaatgctcctactacacccataaaaataattttagatatccaatagcgtgtatggctctttaattttaatatcagaacttcttccgcaattaattctatattgctgtaataagtaaaaccaatccaagtcattagtgcaaaaagaaaagcggctgaagataccatgctgcctacaatatcaagtaatcttatggaataagccattaccatatatattataaatataaaaaaaggcattatatatttgtgagatttcatgtacattttaaaattatattttaataccgatattaacataagctacattccttttacctttcaaaatactttaaaatataaccattattaatcatttctactaaaaccctattgctttcgcttacttttgttttgaattctatataattctcattttcccgataatcgtagatacccttaatattttgagtcacaaaagatttatctacttcctttctataaaaagtcattgaagcatgtttctcagaactaatatcttccctcttaatctcaaatattttagaatctttaacctgtaatattctactggataattgatctattaaaaataattcgtgacatgacattattactgtaacgccatcttttataaactctcttaccattctaataaacgttttttgtgaatcactgtcctgtccagatagtggctcatctaataacaaaatatctggttttgacaaaagtgcctgaactacggaaatcttttgcagggtacctttagataagtttttcatagaaatgtttatcatattttctaagttaaactccttatataagtaattagttttcttcacaaaatcatcttttgatattccttctatttctcctattaacttaatatattcacctgcttttatgttaagcggtgaaaaattctctggaatataattaaatttaagattcttgtctcgaataacctccccagaagttatacttgtaagaccgcacaaaatctttattaatgtgcttttccccataccattatgtcctgttaaagcaatactttcgcctttcattatatctaaacttatatcatcaaaaatcaatctatcatcatattttttcactaaattttttacttttattattggtatattcataatatgcccccgtttatcataataagcatgatcatcttcgtattataccactttttacataataataaaaataattacaaacaccacggatttaatatactctttaaagcttaatgcataatagttatatcgaaccatttattaaatatgccatgttacataaattataaactagtagctccactaattggctctactattttagaacttgtcttatttcttataatctgtattttaaacgtattttaatgctaaattatccagttccatttttaattttgaattgttaagtttagctgcaattggagaaaatatctcttatgtaataatcaaagaatcatttaacaatcatatattaagcaataaaataaacccaacagaaaacttatcttctctgttgggtacagctttatatagaaataattattttgcagttctaatacatatttcattaaaaataaagaatgaactatattatttataacttatctatactattaataatctattttaaatttttaccagtaaatgccaaaggtagaatttcttctaatgtatgttctaagtattcttctgtacttttagcaataattattttaaaagtctttaaatcacagaactctgccataacttgcctacatactgcacatggtgcacaaaaatctccttcgccaggttttaccccttttttatttcctaccactgctattgcagtaaattcttttttcccttcagaaattgctttaaagaaagctgttctttctgcacagtttgttggtgtaaatgctgcattttctatattacagccctgatatattgttccatcatcacaaagtaaagccgcacctacattaaaattagagtatggagtataacaaaacttttgtgcctcaaatgctttttctatcaatacttttgcatctatcatatttcattaccaaacctttctttaaaattccaatatattactatatattgaggaattaaattgtaccactattatacaagcatgtaaatataatttcatgtagatatccaactctaaaactaaatttatgtggtaacttaccgaaatcataaatattttgttccgaaaagctatgaaaatatcgctgaaggttctaagcagcaggttgtatccactttagcatgctccaactttcagtttgacaagctaaaatagaacaacctacagctaagaacctttaacagctcattttcaaatgttttctccacaaatatatttatgatttctagtgaagatacgaacttaaagtcttagcaactttataaatatgtttatctgcatagatgtcacaactaagtcccaaacttatgcatatagctcgccgaaataaggattatactgttgtctcagtttctacttttctcctaaatcttataatctgttttccatcagaaataaatagccctaataatgttaagataattcctataattgaaataaaagttattttctcatgtaaaataacagcagatgaagcagcggttattacaggtaccatataaatatatatgcttgttttcaccactcctaaaatcttaactgaccaattccaagttacaaagcataatgcagatgctccaaaacctaaatataagatattcattagatttgatacattagtaaatctatataattgaagcttaaaatcacaaataaatatggcaggtatcataaaaattaatccatagaaaaatactttgcgagtacatataatggtattatattgaaattgactaattttcttcatgacaacagaataaaccgcccataagatagcagcaagtattgctaatatatcaccaaatggatttaattttaaaacaaattttccgttaaactctataagaagtatccctattattgctattgtaagtccaatgaaaaagcatgatgttaacttttcattatctaagaacagattagcaaaaacagctgtaaaaaatggagcaattgaaataagtacacctacattagttgcaagagtatagctcaatgcgacattttcacaaaggaaatacaaggttactcctgctaatccagctgctgcgaaataaagttcttgtttcaatttagccttttttatatgatatgggcatatgcaaagcaatgtaagatatccaattataaatctaaagattaaaatctcaattggtgtaaaatcttttaataatactttagttgaaataaaggttgtcccccaaattaatattgtcataactgctgataaatgtcctgccttaacttttttattactcattttctttactcctacatctattaataaaaatattcatatactgctttggcgttaatccaattaactttttaaaaaagtttgtaaaatgactttgatctgtaaatccagttttgaatgctacgtctattggggcaattccttgttccagcatttttttcgccttgccaatacgaattgtttgaagataattatatggtgatattcccttttgtttagtaaaagagtgtaacaaataatatttacttaatccagttaaattgcttaattgatttaatgttatattttccatataattattttctagataatcgcacactgtcttaatttctgcactagcttcctgtatagtcatttcagaaactggatttgaatattcccttatcaattgctcaattatgaatagaaacaattcctctttttttaaatccttctcctcctccattatcataagatgtaactcttttaaagaagatgtaagttcattacggaataaaacaaattccataaaattaggcagatattcttttcctgttatttcaaatgtgatttttttcataacatcttttttaatattaatgcacctataatcaagcgtcctgttatcaatttgttcgcatgtatgaatatcaccaggattgaacactattaaatcccctgtttctataatgtactgcttatttttgcaagacaaatacctcttcccattctcaataaatccaataacataatagtcgtgaaagtgatttggaaacttctgcatgatacctttaaagttataagcctctatgcctagctctgtatcaaaacaaacagtcctaacttcgtttaacatcttttttcatcctttccttatgtctgttctctaagaatatcatagaaattaaaatagttcttgtatgatgttgttcaactttttatttaccatgatttcagaaattaatatgtacaataatagatttttatatattattgccgccgctcatatggaaaccttttaaatattatgatataattcccatgtataattcaatagttttgtgggctactggtatcacttacctcttttttgaagggaggtgatacttatcagtaatgacgttttaacattactatttcaaggtggattattcttaatatcgctgttaacattgatagtggttcttatagaaaaaatctcaaaaaaatagtagccccaggttcaattggaaggctactatttttaaataaaaatcttagtgataccagttgcctaagcaactagaattatatactatagtgaaaagcatattgcagtatgtttttcactattttcatttttatactatttccttacactatatgcaagttttattaaataaatcatagatttagaatcttacttatattatatcaattttcactaaaaaataaacacatatttttattgaaatatacttctataaaatatcctatatattattatatctcctaaagttattagtcttactcagttatttctattctattcccatctggatccaaaatgcaactttcataatatccatctccagtgtaacgaggttcactcactacctcataacctgcattccttaatgactcagtaagattattaactttttcaacactgcctacagaaatggcaatatgaattaacccaatatattgattaatagtatcatttaaatttgaaggaattgttggcatctgcataacttcaagtcttgctcctgaatcgaatttaataaaatatgattcaaattgttttttatgattaatatatttatctccagcaactccttcaaaataagtaacataaaagtctcttaatttttctatatccttagtccatatagccacatgttcaattttcatatttacacttcctttacctttagtattaactctaaatttctgcgctaatatattaaatttaattaaacgttgtaatcatcaacatcaaactcattgtttttataataatatttacgatcttcttcagtaatctcacgcacaaccctacatggatttcctaccgctatcacattatctggaatgtctttagtaactacacttccagaaccaattacaacattattccctattttaacacctggatttattacaacacttcctcctacccaaacattatcaccaattataatgtcaattccatactcataacctgaatttcttgactctggatgaattggatgcccagcagtataaattgatacattaggtgcaaacaaaacattatcacctattattacctttcctacatctaatatcgtgcagttataattagcaaaaaagttattgcctacttcaatatttttaccataatcacagtgaaatggctgctctatacaaactttatcaccagtcttacctaaaatatctttaataagttcatccattctattcatttcatctggacgaagtaaattatattcatgtatttttagcttattttccattctttcttcactaagtccatctaaccaagctttatatggtaatcctgctagcattctttccttttgattcatctttctattccccttttcttcatctatataattattctattaatatctaacatctgcaaaacttcattagtataaaatacttatttttcaccttgaggtactttgtatttaaatatagcaattaatattaaagaaacactataaacaactgtaaatgccaatgaaaatgctattccatttctcattgttgctgaatatatcattcctgcaataactcctgcaataccttgtacaaagctaataaatgatattccttctgcaattagtttatcatctaaatgcctctgtgcaaatgcaaatggaacaacttgatgtattccaactccaataccaataattgcagtagataatataatcacaaagtaacttgatataaacaatgttaatacataaataagtgttcctatcaaaatagcgcccgacatcaatataaaaatcatctttgtacaacctttctttgaaatatatatgccagaggcactcgataatatcataacaaagatattgcaaggagcaagaacaacagcactaatggtagtgtttgctcctaatactgtctgtgcataaagtggtatgtaattaccactacatgaaatgcatgtagctataaaagtaattaaaataattgttacatatcccttttgttttagtaattttacaataaataattcttctttattgcttctatttatatgaagattttctcctttatcatattcctttatgctgctttttataatgattctattttttgttttacttcttggcataaaaaatcccacaaatatcattccaattataaataaaggaaacagtatagcaagggatatcctccaactccatctctctgtaaatattccacaaagtactggacccaaaatgagtgtcaatgaataaactgtctgcataattccaatcctaactggatactcttcttccgatactatatcgtttatcatagtaaatacatttgcaaaaaatagtccccaaaagaaacctgaagctcctctagcaataagaaatacagttccacttgatgctgctgcactaattccaacgcttaaagcaaacgcacctacactccatatatacaattgtttacgtccaaaatattctcctgctctaccagaaataagtaatgatatacttcttgctagtggttctattacaaacatagcattaaacaaatctatcttgccatattcacgaaaagctgtagccgcataaattcctgtgctcccaacaaggtaggatgcacatatatttattataacaagcccaataaataccatatctgccttatctaagtttaatcttttggctttcatttctctttttccaccttttcaaattaatatgactacagaaaagattttaattctgatataatattctcttcatccctctcacaatcagttccccctatagatatactaggtttagttttcccatgaaaattactttcttcttcaattgctttctttcattgttcatattataataatattccacgatgactactaaaaatataagaataaattatatttttataacaatagtatattaattgatattcataccgtttggaggggaaactatgttaaagatgacactattaaatgacaactcagaagttgtatcttataacttcgcggattttcctattcgtgcaaaaaagtctttgctttcagactatccaactatggcagctgctaaccattggcatactgactgggaattcatcttacttttaaatggtaaaatgtcttattctgtaaatggtaagagctacgaattacaagaagggcaggcaatttttataaattctgagcagatgcattatggatattctgctgatggttctgattgtaattttatatgtattttgtttcctccatcccttatttctagcattacaagaattaaggaaacttatatactgccagtatgtgaagacacatccaatccattttttatattgcatcccgaaatcacttggcaaagaaacttgattgaacttttgaaaaacgtttatgagttatgtaatgaagaaaaggatggatttgaattacatgtcatgagcctttttaatacaatatgtttcagcctttataacaatataaaagatagtatttccattcaagaaacagctgatgataaaaaacttgaagctatgcataatatgacaggatatatacagaaaaattatcaaaaaagaatcactttaaatgagattgccgctgctggaaatgtatgtcgtagtagctgttgtgatatttttaagcttattttgaataagactcctgtttcctatttaacagaatatcgtctagaaaagagcattgaactcctaaaaatttcttccctttcagttactgaaatagcacttcaatgtggatttacaggttcaagctattttacggaaatatttcataaaacactagggtgtactccttctcaatatagaagaaagaaatttaataacctatgattaaaaatccaaaaaatattagtgtatatgttcaatataataaatctacataaaaaatctataaagccaagctctcaattaaagctaaaatgtataaacttaatcgcaacttatatttttcatgacaaaataatgtaaataataactatatggctatcatcatgatagcttattttgttatggtatctaacatagcacctccatatctatgctataataaatttaatatatcaatcgtaaattataattagataattgcgaaactcattgataaaaatgaataatgattgatttgaagttgcaaaaacattattaatggatttaatggttcctgctatacaaatataatagttgacttcttaaaaaagggcgcacgaaataaagcgaaggtgaattccaatttttataaataaattttatgcaattaatggctttaagcttcggatatatttatgtttatgaattttatctgccacgataactgttattagttgagttattccggctagaagtaaatcagcatgaagtgtttgctcattttgagtcttacgctccgcgacgcagtaactatatttgaagtgatttatatttttttcaacagctactctgattttataagtattactccattcttgggttcctcgtgttattccaggatatgcgcgcagattcttttcaggataaatataaaacattcgtccacataaggaatttgtacatggattttcacattgagttacacgtttgctctttttggtttctttgttatataaccatttcattttagggcatacaaacttcattgttggaattctagaacgaagatgacttttactaccttcacgtttcattggaatagaaggatcattcggacagcatggaatgccgtcttcgtttaaagggcaatcagcattttctagtgtaagcctagtttttaaaggaatatatgctttatcaaattttaattcgagaagaagatcacgataaatttgaatactgtcaaaagcagcatctcctaaaaaggtttttggacttattaatggatgcttgttaaaaaaatctttgagaacagggataagagccttagaatctgcaagagatttatcttcatcaggtgaatcagattttttctcaacaataatatcaggatgagcattgagaaaatctttattatagaacgaaatatctcttacgataccgaggccattagtaatgattccgaatttaaaagcatagcaaaaatgcccattaatatacatttgttggatggcagggttggctgaagcgtgtgatggcatagagccataggcagctttataaggatcataagagtcatctaaattgcatgctttcttaaaatttttaagctgttttataatgcgattagcatatttaggattattttcagtgacaaatgcttcaaggcctgaagtatcaaaaatagtcatggaagcaagagccgtatcaatctgttggcatatcggttcagtaatatcaacaagattatcgaacatggattgtaagtccaaaagaaagtcctgcttgaaacgagtaaacttagatgaatcaggaactcttaaaaagccgcagaagtctcttagttcttgagaatatttaaggaaaataattaaaagagaatctgtaggaatagaaaaaatgcgttgtaaaattaaagcactgatcatagcataaagctgatattttcgcggccttcctgtggaagcgtaaaaatggttaatgaaagatgcaggaactaactcatcaaggtcgatagtgttttcgagtaaagaaagaaattggaatttatcattttcaaatttttctttgcaatcagaataaacatctgccaaagaaagctgtttatatgttatcatatatatgactcctttctgaggtatatggtagttttgtttttaggcaattcaattttaccataaatcagtgaggagttattttattttgctaaaaaaatatcccgcatttctgcgggttgcggcgtttcgcaaacgcctataaattataataaaagaaaggagtaatactcttggataatataaaatgtgagcgtagaatatatagttttaaaagtgatactcatgctcatgaatatggccaacttatcttgccacttaacggtgccctttctatagaaactgattataagaaattagatttaaaagatgattcattattctttcttcctccagattgcaaacatacttttaatgctgataatactaatgaattcttagtattagatatacctgataaaatgctcaacaaatatgacatggaaaaaatgtgtggtggacaggatattttgtttgatgaaaaatggaaggcaataagatatttattgttaaatgaagctgatgttcacaaaacatcgagctctataaataacttattcctctacttttataattttattactactgaaaattcacctaattccattaaatatattaatgataattttaccgaagatattgatttaaaaaagctagcagatatagagcattacaacgtcagttattatagtgaatggtttaaaaataatatgagtgtttctcctactgaatacatacaaaatttaagagtaaaaagagcaaaagaactccttttaaatacaaacttaacagttttgcaaatttctcaaatggttggctatgaacacaattcatcatttaccaaggtatttaaaaactcagaaaaaatatcacctgctgagtttagaagaaacatcaaaaaatagactaaaaaacaactgtattttagcaaagatttatctaacagaagcgatataatatagatatccaaaataatagtcgtacttatctaaaattataaatgttaaaagaattagcttatataaagagaggatttgctttagtcatgaaagaaaaaatcactaaattgataaaaaactttattaaagaatatgaaaggcaagataatatttcaacaagatggggtgatcctttagtaggttttgctgatgctaatgatccttacattttaaattttaaggagcttattacaccaactcataaattaccaaccgatgtactttctgatgcatcaattgtcatagcatactttgtcccattcactaaagaattggctagaaccaatggaactcctggtgatgtttcctctcccgaatgggcattagcttatgaagaaactaatgcaatgtttgttaggcttaatgaatatatgatatcagaactgcggaaacttggatatcatgcagatatttcgccagaagcttctacatttgaccagaagatattaaaaagcaattggtctcatcgtcattttgcaagagctgctggtcttggaacctttggtatcaataatatgcttatatctaaggttggatgctgcggaaggtataacaccattgtaacaaatctagatgtaaaagcagattcgcctttaaaagaagagctttgcttgtataaaaagaatggaagctgtggtgtatgtgtaaaacattgtccatcaggtgcattaactttagatggatatgatagacacaaatgctatgtggtactaatgaaaaatgcagaattatatacagagtttggaagttcttacaccgatgaatctggtgatgaaccaaacagtataggtagtgaagtatgtggaaagtgcgtagtaaatacaccatgcacattttttatcaaatagcttgcatctgcgacattccctctctactataaatagactacttaataaactcaaaagcttatgtgtaaaattcctccatcgcaatataaaatgctctaaacttaagaacctaaatataaaacttggcttctcacttttagagcataacttttaatgaatatttttattacatcctcacataataattttagttatatagtatataccttaaaattatgaaagaaggcttatcaaatgaaaaaattcatatatactctttctatctttttactcctattatttacctttaatacaataacaattaccgctcagttaaaaacgtattcccagggcttttatgccatgaaagatttgaatttaagagaaaatgttagctataaagtccagaatcatgagccttatgttgaagggctattaatagttgtcgatgctgatagaaaaatacaacaacttattcgaatacccgctaactccactgaaattcctatagcccctcttaaatatgattataaatttataatatataataatattcttttgacattttcttaaaaggcacttctgcagtgcctttttaatttactttaatgctaaattttctataattatgcgttatttcagctataaaatatactgcgaattctctttgaacaataaggtaaatataaatccttacgttaatgtgaagatacaatctttaatccaactatcccaatcactataaatccaatacaaattagtctaattatatcaacaggttctttaaatagtattattcctaaagctacagttccaactgtaccaattccagtccaaattgcgtatgcagtgcctaaaggaagactctttaatgccaacgataaaaaatagaaacttgctatcataccaattatcgtaaatacacttggtataagccttgtaaatccttctgaatactttaaacctatagcccatcccgtttcaaataaacctgcaacaattaacattaaccatgtcataaatttcactctccctataatatttataaatagatatagttcatagactgtatagttttgctactttaaaagttatcaaacaatttagcttataaatttcttattataaacattaggtaatattttcattaactatttagtaattcctttaagatctcctcaaatctttcatcagttataccaagctttttcttaaatctttcatcttccattctttcaagtattatcttatcaggagatatttctttaataatttttttcatcttctgaattgactcctcatcatcgttatatcccttaattatagtaacctcaaatataaattttccattgtactgtttattaaaggaaaccatatttgaaatatattcattaagagtatatccttcgattggcctttggattttttgaaaatcttcttctgttattgtttttatttccccaataacctcatcacatctattggctatttctatgtattcatctctgcctagtaaatatccattagatagcagtcgtactggtaaacctttatctttaattaggtcaattatataaccaattttatcattaactagcgcctcccctttggagttaataaaaattaattctgcattagcattttctatcatactttttagttcttttaatgaattatccatttcatcaaatgacttctgagtatccaccttattttgcgaccttccaataggacaaaatatacaatcaaagttacaatgcttttcaggaagtatgttaacctccagtactctttttccatcctcaatataaatatctttataactgaaactactcattaatttatcctcctgcaaattactctattgttacttctttattattaatgtcaagaatcaagactttacttagtccacctaaactatcttgtacgacttttgataaatcctttagagcattctcaaactcttctgctcttctttcatcgattaattcaatacataaaagagcattttttgtattttcagtaagcattgttctcactgcttcacgccaattaaaacatctgcatattgcacctttatcatctttgtaaactacttctccttcatatggaggtgaattttcatctgttccaagtggaataaattcctcatttccaacattaatagttcctaaattatttccattattcactcgctttagtaatgcctcaatggatgatcttgcgcctttctttgttttaaactttttaaatgcttctctccatacttttataacttcattactactgaattctgtattacttaaatatttcaaagcttccttttctgaattgcaaatcatattcttatacttgtcttcatcttttattgagttatctataccttggcaaataacaacacctatcctcgcattaggaaatagactccaaaaatcattttcaataataaattttttcattaaactgtgcctccttaataataaaaataaaaaaagccaaggagatattgtaaaatatctcccaggcttttatccttccgtgaacatagtataaactatgcgttttctctcggacctgccagttacaaactgcggaaccctagaaaacttaaatatataattaaattataatttgtaatctgaaaattgtaatttaattttagcacaatacaaatgttaaatcaactctttgtgtaattacttatcagtaaattctgcatccatagcatattctactgatgtcaccttattcaatttttatatgatgtaattccattagttacttttgctttaaatttacttaataataaattggttttgtccatcttattttaccaatcactagatccagaatctgagctagatgatgagtcatctgaacttgaacttgaatcgtcatctgatccccaactgcttgtactattatctgaatcccaattaccagataaatatactgaatcgctacttgaatctgataatgagttagactccttagaactatcattatccaagctattagaagtatatgatgaagtgtccctataatgttcgttatcatctctatatccatgttcttcatgataatgctcattataatgttcatgatggttacgtgaagattcagataccatttcacctacaatcataccttctagaaaatcattattactattgttgttatttattatagtagtattatttacatggccgcctgaaggatatgtatcataattgtttgatccattatctgatgtccttgttgagttattattaaaagctgaattattgttattaaaattagaagaagactcattattatttctataatccgactcatttccatgactcgaataattttgctttgtttcacttttacttatattacctgaatgaaatgagttatcatcagaatctaaatatgattctaagttattttcctcagcgaatttcctttttctttcttcataatctctattcattttattttttataactttaaataatattattgcaattactatgatagctattataataataaatatcccaaaataatttgttttatgcgatacagtttttgaataaccatcctttaccacttcagctttgccagtattaactgccttagttgtaactttttcatcgagtgcctttccaactttcataattccactatcaaaattgttagctttaaagtctgaatttggtaatgctacaatattagatatatctgattgagacaaaatgtcatttgccttatctccaactaaaattttatttttcttatcacctattgatgttacaaataaaatgtactgctctccacttatattgctctttgcatattctttagagtaatcatcaatactttttccattcaatgttttgactatatcaaatttaactattacatctgtattcttttctatcttggctaagttttcttcaacagtattaatagtatcttgttttaaaactttggcatcatctactatatgcttacctgctgcatacaccccaattgtcattagtaataataatattaaacttgataaaataattttctttaatttcatctcttttcctctcttttttataatttatttttgatatagttagtttatatactataaattaactataatttgccttaattttaaaaagtctattgagtattaaattcacttaaattcagatatctttccaccataatacttttaaatttaaaaattattactcttgattatattaattattaaatttaaaaattactataaattgttataaattatatatttacaatcttcatagatgctaaaatcaacagattgtactacttaaccagtcaatctgaatctaacttatatatgcaattttattgattactctttgattttaatacagatcattataatttattgtcattaaatacaacaagtactgtagttctgttagtcaatagaattcatagtaagtatatgaaaaagttttataggtaattgttttcattctatatcgtaacgcctagacttactatattcataaagaagctctcatcttacattctcctgtaaatttaaactcattttctattataaataaattatagcataatttgtaacaattttattattatattttcaaattatatcatcttttgccattatttatttaattataatatctactcttctaatatttattagtattttaggcacaaaaatactccctttaatgtcaacagatttctattttttatctgttgacattaaaaggagcatatcacttctgaaataattctatacttatgtattgcataaaactacgctttaattatttcactatattggatattatccttatagttatcaaggactacttttctaatatccataatatcatctggaagattatttatgttaaaccattttaattcagaacatttatctggttccattatcttaggaatgccatcatacttattaacttcaaaataaatgtcataatatgttcttcctccagtatcgttaacacgatgggataaatgagcaaaagataatccttctatttttacttcaattcctaattcctctgcacattcccttataacagccattttagctgtttcattttcatcaacatgtccactacctgctaaatcccattctccatctttataaccggtatttttccttctatgcagtaaaatttgcacattgccgtcttccttttgtaagataattggaatcactgctgataatgatttaaaatgttctcccatttcttcacctctagaaattactatttatttcataatgattataacatatataatattatttaatttatttgaatatcaatttgattttatatataagttctaattaataaaattcattgcttgttaactcatgtttatattatttgataagtttgcacaaaataaatctagatttattttgtgaggtgatcccaatgatgaatttaaacagaattacaatagaagataatcggagtgcagtattagaacttgaaacagcaatgacagaaactaaaagtgtacgaatgtataagcggtactctgtagttttaaaacactttcaaggttttcaaaataagataattgcagaaatggaaggattagaagagcatgctgttggtaactatattaaaaaatataaggccaatggattagaaggtcttgctatgaaaaagccgcctggtgcccctagaaaattaaattctgagcaagaacaaaaacttatttatgtaataacaaataatacgcctgacgaagtgggttttgaatcaataaaaaactggactatcaaactaatatgtcaatgggtcatggttaattttagtattactataaaacatagtagtatggcagttatacttcacagattaaatttgagttatacaagaccaacatatgttttaaaaaaggctgataaagaaaaacaagaaactttcaagaatgattttgaatatctaaaaaaaacaccttgatggcttagttgatactatcttgtttcaagacgaatcaatgataagagattatcaggccattcaaaagacttggtttataaaagggaaacaacgaaagatacctacttatggaaagaatgcaggcgtaaaattaatagggatactagattatgaaagtggtcatgtatattgtgaagaacacgaaaaatatgatgctgtagtttttcttgagtttttaaagaaggtgcttacgcaatacccgaagggtaagatagttattattcttgataatgctaaaattcatcatgctaaattgatacaaccatttttggaaaaactgaaaaatagacttgaattaatgtttttacctccatacagtcctgacctaaatctaattgaggggttatggggatggttaaaatcatcagtggtaaacaatgtattctttaaaagttggactagtattcgagttgctatacaaaacttcattggaacaataaataaagttcctacacaaacaatagacaggctatgcgttaaaatgtagcaactttattagaacatatatatgataaatatttatcattatctcgttaaaatttagaacttcataataaaaaaaaattataaaactcatttactttttaataattgtatatttaaagtagatgttctctgttcaaaagtctatggattaaacttcagcttttttactcataaattgctttaatatttaatataatacatatcaagcttataataaggctaatcatagatgtgtaataaaagaaagagccacttccatatatctttattaatccaaaaaagcaatacgcgggtccaatatcaccaccatcaaaaagaaatacattaaaaagaatatatgttaataaaccaagataaaatgctttcctttgtttaactgctccttctttgcgactcgttaaaacataaattatacctgaaatcaatattatagtgttatatgctaaaaatggaataataaaaattactcttatccaacctaagtttaaaatatacgaaataatgccaactataactgttaatactactagcactaaatcagctgcttgttgtttagtttttatcaattctaattgcctcctaatatcacaagttaatatatatatttaaaagttaatactttttataatgtgatctaatatgctataaaaatatactgttttgctctcttattaataagctaatgttctgaatgaaatataatataaattgtagatatattgttatttaatctttttattattaaatggcaatataaaaacaataaagtagaaagttgctccagcaaaaaagatttaagcaaaaagtgatattctcttgaagaaaagttctcaataattaatgtgccaataatattaaatactgcagcaattagaaataagctaattctcatatgtcttttactatttattaatctttctatccctaattttgggcaaaaaaagtctgttataaaatatgctacaaagcaagctacaaaccctaaaaacaagctattcataaagatcattccccttaccatataaataatgcaaccaagttattcttcctctatatttctattatagcatatactgtaaatgatttttttgtttgtccaaaattcaaaaaatgtatcatttatttcttctactaaatatttttacacatagctgtagtaaacagccacttataattgttaatataatatagctaattatattgtgtttcaatttgataatttcaaatcctatataaaaagttaaaaaaaataacacgaatatagttagagaatatattattctaaacattttatcacttttcatgtattatcaccctccaataaactactattatgaattatacggttaacttgtctcacttgcttaaccttgtcagggaactaatcatttcaaactaaaattatgcttttaatattccatactattattttaacattactggttcaaagccaagcattcctgtaataaataacataaaaatgttttcattattttaaattgtcttttctatctaaaatataatgaaaggaaataataaatggaattatacaaataaatcctaccagcatttgcattggaaagttaaagtagattcttttatggtaataggcatttgtagatagaattgataataaatatgccaaaattgtaaatgaaaataacataccattcaattttcaaagcttaatataattactcagaaatgataatatatatttataaccgccttataaattgagatttagtgaatttttgttgtatatctactattgtatagggaaataaatttcaatctgtgattcttcatcttcagctcctaaaaatttctctgtatagcattctaaatcatctctgtcatctagttgaaaactactattaggaaaccagacaccccaaatataatgatatgtagaaatcaagtttttcactgtgcctttgtgtacgaatttagcatactttccaccactaatttcttttaattccattccttctggaatattattgtcatccgatgtttcaattcctataaataaagtggtttcactatttttattaaatgtattttgcaggcatgtaccacttgtttcataaatactatatctattattattcattgaaatatacttttgcttctccaattgagcgttcaacttttcccacatttcaatactgttatttttctcaatactcatgtaatatctaaatccaacaacacatttaggttgaaatgttactatttctggttgaagatttgcataattggattcagtgattttatcaatttgcattggattatgatttccaatcaacacatcaataccattttctctatattccatcggcgtaattccatatctcttcttaaaggctcttgtaaaactttcagcagactcaaaatacagtaaaatcgctatatctaaaatccttttcttgctatgtacaagattatatgccgcttgagtcaatcttcggcttctaatatagctgccaatagtttcacccatcactacttgaaaataacggtggaaatgataataagaataggaaactgcactcgcaactgattctacagtcaatggctcatacaa
